(19) United States
(12) Patent Application Publication
(10) Pub. No.: US 2023/0227856 A1
(43) Pub. Date: Jul. 20, 2023

(54) SELECTION BY ESSENTIAL-GENE KNOCK-IN

(71) Applicants: Editas Medicine, Inc., Cambridge, MA (US); BlueRock Therapeutics LP, Cambridge, MA (US)

(72) Inventors: John Anthony Zuris, Boston, MA (US); Carrie Marie Margulies, Waban, MA (US); Chew-Li Soh, Brooklyn, NY (US); Peter Tonge, Toronto (CA); Mark James Tomishima, Springfield, NJ (US); Conor Brian McAuliffe, Morristown, NJ (US); Claudio Monetti, Toronto (CA)

(21) Appl. No.: 17/923,358

(22) PCT Filed: May 4, 2021
(86) PCT No.: PCT/US2021/030744

§ 371 Date: Nov. 4, 2022

Related U.S. Application Data
(60) Provisional application No. 63/019,950, filed on May 4, 2020.

(51) Int. Cl. C12N 15/90; C12N 15/11; C12N 9/22; C12N 15/10; C12N 5/074; C12N 5/0783

(52) U.S. Cl. CPC C12N 15/907; C12N 15/11; C12N 9/22; C12N 15/1082; C12N 5/0696; C12N 5/0636; C12N 5/0646; C12N 2310/20; C12N 2800/80

(57) ABSTRACT

Strategies, systems, compositions, and methods for efficient production of knock-in cellular clones without reporter genes. An essential gene is targeted using a knock-in cassette that comprises an exogenous coding sequence for a gene product of interest (or “cargo sequence”) in frame with and downstream (3′) of an exogenous coding sequence or partial coding sequence of the essential gene. Undesired targeting events create a non-functional version of the essential gene, in essence a knock-out, which is “rescued” by correct integration of the knock-in cassette, which restores the essential gene coding region so that a functional gene product is produced and positions the cargo sequence in frame with and downstream of the essential gene coding sequence.

### CROSS REFERENCE TO RELATED APPLICATIONS

[0001] This application claims the benefit of U.S. Provisional Application No. 63/019,950, filed May 4, 2020, the contents of which is hereby incorporated in its entirety.

### BACKGROUND

[0002] One major problem with targeted integration strategies for the generation of genetically engineered cells is that successful targeted integration events can be rare, especially when using double-stranded DNA (dsDNA) as a template where knock-in efficiencies are often below 5%. There is therefore typically a requirement for a screening or selection strategy that enriches for cellular clones that harbor a successfully integrated allele or gene. Many selection strategies have been devised to identify correctly targeted clones, e.g., by co-integration of reporter genes that confer fluorescence, antibiotic resistance, etc. However, these selection strategies are time consuming, inefficient and not desirable for use in a therapeutic context. Indeed, even for a single targeted integration, it can be necessary to screen hundreds, sometimes thousands, of clones in order to identify a successfully targeted clone. In situations where multiple edits are desired it can be necessary to screen tens of thousands of clones or more.

### SUMMARY

[0003] The present disclosure provides strategies, systems, compositions, and methods for genetically engineering cells via targeted integration that do not require external selection markers, such as fluorescent or antibiotic resistance markers, while yielding a high frequency of correctly targeted clones. In general, the strategies, systems, compositions, and methods for genetically engineering cells via targeted integration provided herein feature a targeted break in an essential gene mediated by a nuclease, and integration of an exogenous knock-in cassette that, if inserted correctly, results in a functional variant of the essential gene and also includes an expression construct harboring a cargo sequence.

[0004] In one aspect, the disclosure features a method of editing the genome of a cell (e.g., a cell in a population of cells), the method comprising contacting the cell (or the population of cells) with: (i) a nuclease that causes a break within an endogenous coding sequence of an essential gene in the cell, wherein the essential gene encodes a gene product that is required for survival and/or proliferation of the cell, and (ii) a donor template that comprises a knock-in cassette comprising an exogenous coding sequence for a gene product of interest in frame with and downstream (3′) of an exogenous coding sequence or partial coding sequence of the essential gene, wherein the knock-in cassette is integrated into the genome of the cell by homology-directed repair (HDR) of the break, resulting in a genome-edited cell that expresses: (a) the gene product of interest, and (b) the gene product encoded by the essential gene that is required for survival and/or proliferation of the cell, or a functional variant thereof.

[0005] In some embodiments, following the contacting step, at least about 60%, at least about 65%, at least about 70%, at least about 75%, at least about 80%, at least about 85%, at least about 90%, at least about 95%, or more, of the viable cells of the population of cells are genome-edited cells, and/or about 40% or less, about 35% or less, about 30% or less, about 25% or less, about 20% or less, about 15% or less, about 10% or less, or about 5% or less, of the population of cells lacking an integrated knock-in cassette are viable cells. In some embodiments, following the contacting step, at least about 80% of the viable cells of the population of cells are genome-edited cells, and about 20% or less of the population of cells lacking an integrated knock-in cassette are viable cells. In some embodiments, following the contacting step, at least about 60% of the viable cells of the population of cells are genome-edited cells, and about 40% or less of the population of cells lacking an integrated knock-in cassette are viable cells. In some embodiments, following the contacting step, at least about 90% of the viable cells of the population of cells are genome-edited cells, and about 10% or less of the population of cells lacking an integrated knock-in cassette are viable cells. In some embodiments, following the contacting step, at least about 95% of the viable cells of the population of cells are genome-edited cells, and about 5% or less of the population of cells lacking an integrated knock-in cassette are viable cells.

[0006] In some embodiments, if the knock-in cassette is not integrated into the genome of the cell by homology-directed repair (HDR) in the correct position or orientation, the cell no longer expresses the gene product encoded by the essential gene, or a functional variant thereof.

[0007] In some embodiments, the break is a double-strand break.

[0008] In some embodiments, the break is located within the last 2000, 1500, 1000, 750, 500, 400, 300, 200, 100, or 50 base pairs of the endogenous coding sequence of the essential gene. In some embodiments, the break is located within the last exon of the essential gene. In some embodiments, the break is located within the penultimate exon of the essential gene.

[0009] In some embodiments, the nuclease is highly efficient, e.g., capable of editing at least about 60%, at least about 65%, at least about 75%, at least about 80%, at least about 85%, at least about 90%, at least about 95%, or more, of cells contacted with the nuclease. In some embodiments, the nuclease is capable of introducing indels (insertions or deletions) in at least about 60%, at least about 65%, at least about 75%, at least about 80%, at least about 85%, at least about 90%, at least about 95%, or more, of cells contacted with the nuclease. In some embodiments, the nuclease is a zinc finger nuclease (ZFN), a transcription activator-like effector nuclease (TALEN) or a meganuclease. In some embodiments, the nuclease is a CRISPR/Cas nuclease and the method further comprises contacting the cell (or the population of cells) with a guide molecule for the CRISPR/Cas nuclease. In some embodiments, the nuclease is a Cas9 or a Cas12a nuclease, or a variant thereof (e.g., a nuclease comprising the amino acid sequence of any one of SEQ ID NOs: 58-66). In some embodiments, the nuclease is a CRISPR/Cas nuclease selected from Table 5. In some embodiments, the guide molecule comprises a targeting domain sequence that is complementary to a portion of the endogenous coding sequence of the essential gene. In some embodiments, the guide molecule comprises a targeting domain sequence that differs by no more than 3 nucleotides from a sequence that is complementary to a portion of the endogenous coding sequence of the essential gene. In some embodiments, the guide molecule specifically binds to the portion of the endogenous coding sequence of the essential gene. In some embodiments, the guide molecule does not bind to an endogenous coding sequence of another gene, e.g., a different essential gene. In some embodiments, the guide molecule binds to and mediates CRISPR/Cas cleavage at a location within the essential gene that is necessary for function (e.g., functional gene expression or protein function). In some embodiments, the guide comprises a nucleotide sequence of any one of SEQ ID NOs: 94-157 and 225-1885.

[0010] In some embodiments, the donor template is a donor DNA template, optionally wherein the donor DNA template is double-stranded. In some embodiments, the donor DNA template is a plasmid, optionally wherein the plasmid has not been linearized.

[0011] In some embodiments, the donor template comprises homology arms on either side of the knock-in cassette. In some embodiments, the donor template comprises a 5′ homology arm comprising a sequence homologous to a sequence located 5′ of the break in the genome of the cell. In some embodiments, the donor template comprises a 3′ homology arm comprising a sequence homologous to a sequence located 3′ of the break in the genome of the cell. In some embodiments, the donor template comprises a 5′ homology arm comprising a sequence homologous to a sequence located 5′ of the break in the genome of the cell, and the donor template comprises a 3′ homology arm comprising a sequence homologous to a sequence located 3′ of the break in the genome of the cell.

[0012] In some embodiments, the knock-in cassette comprises a regulatory element that enables expression of the gene product encoded by the essential gene and the gene product of interest as separate gene products, optionally, wherein at least one of the gene products is a protein and the regulatory element enables expression of that protein separate from the other gene product. In some embodiments, the knock-in cassette comprises an IRES or 2A element located between the exogenous coding sequence or partial coding sequence of the essential gene and the exogenous coding sequence for the gene product of interest. In some embodiments, the 2A element is a T2A element (e.g., EGRGSLLTCGDVEENPGP), a P2A element (e.g., ATNFSLLKQAGDVEENPGP), a E2A element (e.g., QCTNYALLKLAGDVESNPGP), or an F2A element (e.g., VKQTLNFDLLKLAGDVESNPGP). In some embodiments, the knock-in cassette further comprises a sequence encoding a linker peptide upstream of the 2A element. In some embodiments, the linker peptide comprises the amino acid sequence GSG.

[0013] In some embodiments, the knock-in cassette comprises a polyadenylation sequence, and optionally a 3′ UTR sequence, downstream of the exogenous coding sequence for the gene product of interest, and, if a 3′UTR sequence is present, the 3′UTR sequence is positioned 3′ of the exogenous coding sequence and 5′ of the polyadenylation sequence.

[0014] In some embodiments, the exogenous partial coding sequence of the essential gene in the knock-in cassette encodes a C-terminal fragment of a protein encoded by the essential gene. In some embodiments, the C-terminal fragment is less than about 500, 250, 150, 125, 100, 75, 50, 25, 20, 15 or 10 amino acids in length. In some embodiments, the C-terminal fragment includes an amino acid sequence that is encoded by a region of the endogenous coding sequence of the essential gene that spans the break.

[0015] In some embodiments, the exogenous coding sequence or partial coding sequence of the essential gene in the knock-in cassette is less than 100% identical to the corresponding endogenous coding sequence of the essential gene of the cell, e.g., less than 99%, less than 95%, less than 90%, less than 85%, or less than 80% identical to the corresponding endogenous coding sequence of the essential gene of the cell. In some embodiments, the exogenous coding sequence or partial coding sequence of the essential gene in the knock-in cassette is 80% to 99% identical to the corresponding endogenous coding sequence of the essential gene of the cell, e.g., 85% to 95% or 90% to 99% identical to the corresponding endogenous coding sequence of the essential gene of the cell. In some embodiments, the exogenous coding sequence or partial coding sequence of the essential gene in the knock-in cassette has been codon optimized relative to the corresponding endogenous coding sequence of the essential gene of the cell to remove a target site of the nuclease, to reduce the likelihood of homologous recombination after integration of the knock-in cassette into the genome of the cell, or to increase expression of the gene product of the essential gene and/or the gene product of interest after integration of the knock-in cassette into the genome of the cell.

[0016] In some embodiments, the nuclease is a Cas (e.g., Cas9 or Cas12a), the exogenous coding sequence or partial coding sequence of the essential gene in the knock-in cassette includes at least one PAM site for the Cas, and the at least one PAM site (or all PAM sites) has been codon optimized or saturated with silent and/or missense mutations.

[0017] In some embodiments, the essential gene is GAPDH, TBP, E2F4, G6PD, or KIF11. In some embodiments, the essential gene is a gene selected from Table 3, Table 4, or Table 17.

[0018] In some embodiments, the donor template does not comprise a reporter gene, e.g., a fluorescent reporter gene or an antibiotic resistance gene.

[0019] In some embodiments, the knock-in cassette is a multi-cistronic (e.g., bi-cistronic) knock-in cassette comprising exogenous coding sequences for two or more gene products of interest. In some embodiments, the knock-in cassette comprises a first exogenous coding sequence for a first gene product of interest, a linker (e.g., T2A, P2A, and/or IRES), and a second exogenous coding sequence for a second gene product of interest. In some embodiments, the genome-edited cell comprises knock-in cassettes at one or both alleles of the essential gene. In some embodiments, the genome-edited cell expresses (a) the first and second gene products of interest, and (b) the gene product encoded by the essential gene that is required for survival and/or proliferation of the cell, or a functional variant thereof. In some embodiments, the genome-edited cell expresses (a) the first and second gene products of interest from the same allele of an essential gene, and (b) the gene product encoded by the essential gene that is required for survival and/or proliferation of the cell, or a functional variant thereof. In some embodiments, the genome-edited cell expresses (a) the first and second gene products of interest from different alleles of the essential gene, and (b) the gene product encoded by the essential gene that is required for survival and/or proliferation of the cell, or a functional variant thereof.

[0020] In some embodiments, the method comprises contacting the cell (or the population of cells) with a first a donor template that comprises a first knock-in cassette comprising a first exogenous coding sequence for a first gene product of interest in frame with and downstream (3′) of an exogenous coding sequence or partial coding sequence of the essential gene, and with a second donor template that comprises a second knock-in cassette comprising a second exogenous coding sequence for a second gene product of interest in frame with and downstream (3′) of an exogenous coding sequence or partial coding sequence of the essential gene. In some embodiments, the genome-edited cell comprises the first knock-in cassette at a first allele of the essential gene and the second knock-in cassette at the second allele of the essential gene. In some embodiments, the genome-edited cell expresses (a) the first and second gene products of interest, and (b) the gene product encoded by the essential gene that is required for survival and/or proliferation of the cell, or a functional variant thereof.

[0021] In some embodiments, the method comprises contacting the cell (or the population of cells) with a first a donor template that comprises a first knock-in cassette comprising a first exogenous coding sequence for a first gene product of interest in frame with and downstream (3′) of an exogenous coding sequence or partial coding sequence of a first essential gene, and with a second donor template that comprises a second knock-in cassette comprising a second exogenous coding sequence for a second gene product of interest in frame with and downstream (3′) of an exogenous coding sequence or partial coding sequence of a second essential gene. In some embodiments, the genome-edited cell comprises the first knock-in cassette at one or both alleles of the first essential gene and the second knock-in cassette at one or both alleles of the second essential gene. In some embodiments, the genome-edited cell expresses (a) the first and second gene products of interest, and (b) the gene products encoded by the first and second essential genes required for survival and/or proliferation of the cell, or a functional variant thereof.

[0022] In another aspect, the disclosure features a genetically modified cell comprising a genome with an exogenous coding sequence for a gene product of interest in frame with and downstream (3′) of a coding sequence of an essential gene, wherein the essential gene encodes a gene product that is required for survival and/or proliferation of the cell, and wherein at least part of the coding sequence of the essential gene comprises an exogenous coding sequence.

[0023] In some embodiments, the exogenous coding sequence of the essential gene comprises about 2000, 1500, 1000, 750, 500, 400, 300, 200, 100, or 50 base pairs of the coding sequence of the essential gene.

[0024] In some embodiments, the exogenous coding sequence of the essential gene encodes a C-terminal fragment of a protein encoded by the essential gene. In some embodiments, the C-terminal fragment is less than about 500, 250, 150, 125, 100, 75, 50, 25, 20, 15 or 10 amino acids in length. In some embodiments, the C-terminal fragment includes an amino acid sequence that is encoded by a region of the endogenous coding sequence of the essential gene that spans the break.

[0025] In some embodiments, the exogenous coding sequence of the essential gene is less than 100% identical to the corresponding endogenous coding sequence of the essential gene of the cell. In some embodiments, the exogenous coding sequence of the essential gene has been codon optimized relative to the corresponding endogenous coding sequence of the essential gene of the cell to remove a target site of a nuclease, e.g., a Cas. In some embodiments, the nuclease is a Cas (e.g., Cas9 or Cas12a), the exogenous coding sequence of the essential gene includes at least one PAM site for the Cas, and the at least one PAM site (or all PAM sites) has been codon optimized or saturated with silent and/or missense mutations.

[0026] In some embodiments, the essential gene is GAPDH, TBP, E2F4, G6PD, or KIF11.

[0027] In some embodiments, the cell's genome comprises a regulatory element that enables expression of the gene product encoded by the essential gene and the gene product of interest as separate gene products, optionally, wherein at least one of the gene products is a protein and the regulatory element enables expression of that protein separate from the other gene product. In some embodiments, the cell's genome comprises an IRES or 2A element located between the coding sequence of the essential gene and the exogenous coding sequence for the gene product of interest.

[0028] In some embodiments, the cell's genome comprises a polyadenylation sequence, and optionally a 3′ UTR sequence, downstream of the exogenous coding sequence for the gene product of interest, and, if a 3′UTR sequence is present, the 3′UTR sequence is positioned 3′ of the exogenous coding sequence and 5′ of the polyadenylation sequence.

[0029] In some embodiments, the cell's genome does not comprise a reporter gene, e.g., a fluorescent reporter gene or an antibiotic resistance gene.

[0030] In another aspect, the disclosure features an engineered cell comprising a genomic modification, wherein the genomic modification comprises an insertion of an exogenous knock-in cassette within an endogenous coding sequence of an essential gene in the cell's genome, wherein the essential gene encodes a gene product that is required for survival and/or proliferation of the cell, wherein the knock-in cassette comprises an exogenous coding sequence for a gene product of interest in frame with and downstream (3′) of an exogenous coding sequence or partial coding sequence encoding the gene product of the essential gene, or a functional variant thereof, and wherein the cell expresses the gene product of interest and the gene product encoded by the essential gene that is required for survival and/or proliferation of the cell, or a functional variant thereof, optionally wherein the gene product of interest and the gene product encoded by the essential gene are expressed from the endogenous promoter of the essential gene.

[0031] In some embodiments, the exogenous coding sequence or partial coding sequence encoding the gene product of the essential gene comprises about 2000, 1500, 1000, 750, 500, 400, 300, 200, 100, or 50 base pairs of the coding sequence of the essential gene.

[0032] In some embodiments, wherein the exogenous coding sequence or partial coding sequence encoding the gene product of the essential gene encodes a C-terminal fragment of a protein encoded by the essential gene. In some embodiments, the C-terminal fragment is less than about 500, 250, 150, 125, 100, 75, 50, 25, 20, 15 or 10 amino acids in length. In some embodiments, the C-terminal fragment includes an amino acid sequence that is encoded by a region of the endogenous coding sequence of the essential gene that spans the break.

[0033] In some embodiments, exogenous coding sequence or partial coding sequence encoding the gene product of the essential gene is less than 100% identical to the corresponding endogenous coding sequence of the essential gene of the cell. In some embodiments, the exogenous coding sequence or partial coding sequence encoding the gene product of the essential gene has been codon optimized relative to the corresponding endogenous coding sequence of the essential gene of the cell to remove a target site of a nuclease, e.g., a Cas. In some embodiments, the nuclease is a Cas (e.g., Cas9 or Cas12a), the exogenous coding sequence or partial coding sequence encoding the gene product of the essential gene includes at least one PAM site for the Cas, and the at least one PAM site (or all PAM sites) has been codon optimized or saturated with silent and/or missense mutations.

[0034] In some embodiments, the essential gene is GAPDH, TBP, E2F4, G6PD, or KIF11.

[0035] In some embodiments, the exit's genome comprises a regulatory element that enables expression of the gene product encoded by the essential gene and the gene product of interest as separate gene products, optionally, wherein at least one of the gene products is a protein and the regulatory element enables expression of that protein separate from the other gene product. In some embodiments, the cell's genome comprises an IRES or 2A element located between the coding sequence of the essential gene and the exogenous coding sequence for the gene product of interest.

[0036] In some embodiments, the cell's genome comprises a polyadenylation sequence, and optionally a 3′ UTR sequence, downstream of the exogenous coding sequence for the gene product of interest, and, if a 3′UTR sequence is present, the 3′UTR sequence is positioned 3′ of the exogenous coding sequence and 5′ of the polyadenylation sequence.

[0037] In some embodiments, the cell's genome does not comprise a reporter gene, e.g., a fluorescent reporter gene or an antibiotic resistance gene.

[0038] In some embodiments, the knock-in cassette is a multi-cistronic (e.g., bi-cistronic) knock-in cassette comprising exogenous coding sequences for two or more gene products of interest. In some embodiments, the knock-in cassette comprises a first exogenous coding sequence for a first gene product of interest, a linker (e.g., T2A, P2A, and/or IRES), and a second exogenous coding sequence for a second gene product of interest. In some embodiments, the genome-edited cell comprises knock-in cassettes at one or both alleles of the essential gene. In some embodiments, the genome-edited cell expresses (a) the first and second gene products of interest, and (b) the gene product encoded by the essential gene that is required for survival and/or proliferation of the cell, or a functional variant thereof.

[0039] In some embodiments, the engineered cell comprises a first knock-in cassette comprising a first exogenous coding sequence for a first gene product of interest in frame with and downstream (3′) of an exogenous coding sequence or partial coding sequence of the essential gene, and with a second donor template that comprises a second knock-in cassette comprising a second exogenous coding sequence for a second gene product of interest in frame with and downstream (3′) of an exogenous coding sequence or partial coding sequence of the essential gene. In some embodiments, the engineered cell comprises the first knock-in cassette and the second knock-in cassette at a first allele of the essential gene, optionally wherein the engineered cell also comprises the first knock-in cassette and the second knock-in cassette at a second allele of the essential gene. In some embodiments, the engineered cell comprises the first knock-in cassette at a first allele of the essential gene and the second knock-in cassette at the second allele of the essential gene. In some embodiments, the engineered cell expresses (a) the first and second gene products of interest, and (b) the gene product encoded by the essential gene that is required for survival and/or proliferation of the cell, or a functional variant thereof.

[0040] In some embodiments, the engineered cell comprises a first knock-in cassette comprising a first exogenous coding sequence for a first gene product of interest in frame with and downstream (3′) of an exogenous coding sequence or partial coding sequence of a first essential gene, and with a second donor template that comprises a second knock-in cassette comprising a second exogenous coding sequence for a second gene product of interest in frame with and downstream (3′) of an exogenous coding sequence or partial coding sequence of a second essential gene. In some embodiments, the engineered cell comprises the first knock-in cassette at one or both alleles of the first essential gene and the second knock-in cassette at one or both alleles of the second essential gene. In some embodiments, the genome-edited cell expresses (a) the first and second gene products of interest, and (b) the gene products encoded by the first and second essential genes required for survival and/or proliferation of the cell, or a functional variant thereof.

[0041] In another aspect, the disclosure features any of the cells described herein for use as a medicament and/or for use in the treatment of a disease, disorder or condition, e.g., a disease, disorder or condition described herein, e.g., a cancer, e.g., a cancer described herein.

[0042] In another aspect, the disclosure features a cell, or a population of cells, produced by any of the methods described herein, or progeny thereof.

[0043] In another aspect, the disclosure features a system for editing the genome of a cell (or a cell in a population of cells), the system comprising the cell (or the population of cells), a nuclease that causes a break within an endogenous coding sequence of an essential gene of the cell, wherein the essential gene encodes a gene product that is required for survival and/or proliferation of the cell, and a donor template that comprises a knock-in cassette comprising an exogenous coding sequence for a gene product of interest in frame with and downstream (3′) of an exogenous coding sequence or partial coding sequence of the essential gene.

[0044] In some embodiments, after contacting the population of cells with the nuclease and the donor template, at least about 60%, at least about 65%, at least about 70%, at least about 75%, at least about 80%, at least about 85%, at least about 90%, at least about 95%, or more, of the viable cells of the population of cells are genome-edited cells, and/or about 40% or less, about 35% or less, about 30% or less, about 25% or less, about 20% or less, about 15% or less, about 10% or less, or about 5% or less, of the population of cells lacking an integrated knock-in cassette are viable cells. In some embodiments, after contacting the population of cells with the nuclease and the donor template, at least about 80% of the viable cells of the population of cells are genome-edited cells, and about 20% or less of the population of cells lacking an integrated knock-in cassette are viable cells. In some embodiments, after contacting the population of cells with the nuclease and the donor template, at least about 60% of the viable cells of the population of cells are genome-edited cells, and about 40% or less of the population of cells lacking an integrated knock-in cassette are viable cells. In some embodiments, after contacting the population of cells with the nuclease and the donor template, at least about 90% of the viable cells of the population of cells are genome-edited cells, and about 10% or less of the population of cells lacking an integrated knock-in cassette are viable cells. In some embodiments, after contacting the population of cells with the nuclease and the donor template, at least about 95% of the viable cells of the population of cells are genome-edited cells, and about 5% or less of the population of cells lacking an integrated knock-in cassette are viable cells.

[0045] In some embodiments, after contacting the cell or population of cells with the nuclease and the donor template, if the knock-in cassette is not integrated into the genome of the cell by homology-directed repair (HDR) in the correct position or orientation, the cell no longer expresses the gene product encoded by the essential gene, or a functional variant thereof.

[0046] In some embodiments, the break is a double-strand break.

[0047] In some embodiments, the break is located within the last 2000, 1500, 1000, 750, 500, 400, 300, 200, 100, or 50 base pairs of the endogenous coding sequence of the essential gene. In some embodiments, the break is located within the last exon of the essential gene.

[0048] In some embodiments, the nuclease is highly efficient, e.g., capable of editing at least about 60%, at least about 65%, at least about 75%, at least about 80%, at least about 85%, at least about 90%, at least about 95%, or more, of cells contacted with the nuclease. In some embodiments, the nuclease is a zinc finger nuclease (ZFN), a transcription activator-like effector nuclease (TALEN) or a meganuclease. In some embodiments, the nuclease is a CRISPR/Cas nuclease and the method further comprises contacting the cell (or the population of cells) with a guide molecule for the CRISPR/Cas nuclease. In some embodiments, the nuclease is a Cas9 or a Cas12a nuclease, or a variant thereof (e.g., a nuclease comprising the amino acid sequence of any one of SEQ ID NOs: 58-66). In some embodiments, the guide molecule comprises a targeting domain sequence that is complementary to a portion of the endogenous coding sequence of the essential gene. In some embodiments, the guide molecule comprises a targeting domain sequence that differs by no more than 3 nucleotides from a sequence that is complementary to a portion of the endogenous coding sequence of the essential gene. In some embodiments, the guide molecule specifically binds to the portion of the endogenous coding sequence of the essential gene. In some embodiments, the guide molecule does not bind to an endogenous coding sequence of another gene, e.g., a different essential gene. In some embodiments, the guide comprises a nucleotide sequence of any one of SEQ ID NOs: 94-157 and 225-1885.

[0049] In some embodiments, the donor template is a donor DNA template, optionally wherein the donor DNA template is double-stranded. In some embodiments, the donor DNA template is a plasmid, optionally wherein the plasmid has not been linearized.

[0050] In some embodiments, the donor template comprises homology arms on either side of the knock-in cassette. In some embodiments, the donor template comprises a 5′ homology arm comprising a sequence homologous to a sequence located 5′ of the break in the genome of the cell. In some embodiments, the donor template comprises a 3′ homology arm comprising a sequence homologous to a sequence located 3′ of the break in the genome of the cell. In some embodiments, the donor template comprises a 5′ homology arm comprising a sequence homologous to a sequence located 5′ of the break in the genome of the cell, and the donor template comprises a 3′ homology arm comprising a sequence homologous to a sequence located 3′ of the break in the genome of the cell.

[0051] In some embodiments, the knock-in cassette comprises a regulatory element that enables expression of the gene product encoded by the essential gene and the gene product of interest as separate gene products, optionally, wherein at least one of the gene products is a protein and the regulatory element enables expression of that protein separate from the other gene product. In some embodiments, the knock-in cassette comprises an IRES or 2A element located between the exogenous coding sequence or partial coding sequence of the essential gene and the exogenous coding sequence for the gene product of interest. In some embodiments, the 2A element is a T2A element (e.g., EGRGSLLTCGDVEENPGP), a P2A element (e.g., ATNFSLLKQAGDVEENPGP), a E2A element (e.g., QCTNYALLKLAGDVESNPGP), or an F2A element (e.g., VKQTLNFDLLKLAGDVESNPGP). In some embodiments, the knock-in cassette further comprises a sequence encoding a linker peptide upstream of the 2A element. In some embodiments, the linker peptide comprises the amino acid sequence GSG.

[0052] In some embodiments, the knock-in cassette comprises a polyadenylation sequence, and optionally a 3′ UTR sequence, downstream of the exogenous coding sequence for the gene product of interest, and, if a 3′UTR sequence is present, the 3′UTR sequence is positioned 3′ of the exogenous coding sequence and 5′ of the polyadenylation sequence.

[0053] In some embodiments, the exogenous partial coding sequence of the essential gene in the knock-in cassette encodes a C-terminal fragment of a protein encoded by the essential gene. In some embodiments, the C-terminal fragment is less than about 500, 250, 150, 125, 100, 75, 50, 25, 20, 15 or 10 amino acids in length. In some embodiments, the C-terminal fragment includes an amino acid sequence that is encoded by a region of the endogenous coding sequence of the essential gene that spans the break.

[0054] In some embodiments, the exogenous coding sequence or partial coding sequence of the essential gene in the knock-in cassette is less than 100% identical to the corresponding endogenous coding sequence of the essential gene of the cell. In some embodiments, the exogenous coding sequence or partial coding sequence of the essential gene in the knock-in cassette has been codon optimized relative to the corresponding endogenous coding sequence of the essential gene of the cell to remove a target site of the nuclease, to reduce the likelihood of homologous recombination after integration of the knock-in cassette into the genome of the cell, or to increase expression of the gene product of the essential gene and/or the gene product of interest after integration of the knock-in cassette into the genome of the cell.

[0055] In some embodiments, the nuclease is a Cas (e.g., Cas9 or Cas12a), the exogenous coding sequence or partial coding sequence of the essential gene in the knock-in cassette includes at least one PAM site for the Cas, and the at least one PAM site (or all PAM sites) has been codon optimized or saturated with silent and/or missense mutations.

[0056] In some embodiments, the essential gene is GAPDH, TBP, E2F4, G6PD, or KIF11.

[0057] In some embodiments, the donor template does not comprise a reporter gene, e.g., a fluorescent reporter gene or an antibiotic resistance gene.

[0058] In some embodiments, the knock-in cassette is a multi-cistronic (e.g., bi-cistronic) knock-in cassette comprising exogenous coding sequences for two or more gene products of interest. In some embodiments, the knock-in cassette comprises a first exogenous coding sequence for a first gene product of interest, a linker (e.g., T2A, P2A, and/or IRES), and a second exogenous coding sequence for a second gene product of interest. In some embodiments, after contacting the population of cells with the nuclease and the donor template, the genome-edited cell comprises knock-in cassettes at one or both alleles of the essential gene. In some embodiments, the genome-edited cell expresses (a) the first and second gene products of interest, and (b) the gene product encoded by the essential gene that is required for survival and/or proliferation of the cell, or a functional variant thereof.

[0059] In some embodiments, the system comprises a first a donor template that comprises a first knock-in cassette comprising a first exogenous coding sequence for a first gene product of interest in frame with and downstream (3′) of an exogenous coding sequence or partial coding sequence of the essential gene, and with a second donor template that comprises a second knock-in cassette comprising a second exogenous coding sequence for a second gene product of interest in frame with and downstream (3′) of an exogenous coding sequence or partial coding sequence of the essential gene. In some embodiments, after contacting the population of cells with the nuclease and the donor templates, the genome-edited cell comprises the first knock-in cassette at a first allele of the essential gene and the second knock-in cassette at the second allele of the essential gene. In some embodiments, the genome-edited cell expresses (a) the first and second gene products of interest, and (b) the gene product encoded by the essential gene that is required for survival and/or proliferation of the cell, or a functional variant thereof.

[0060] In some embodiments, the system comprises a first a donor template that comprises a first knock-in cassette comprising a first exogenous coding sequence for a first gene product of interest in frame with and downstream (3′) of an exogenous coding sequence or partial coding sequence of a first essential gene, and with a second donor template that comprises a second knock-in cassette comprising a second exogenous coding sequence for a second gene product of interest in frame with and downstream (3′) of an exogenous coding sequence or partial coding sequence of a second essential gene. In some embodiments, after contacting the population of cells with the nuclease and the donor templates, the genome-edited cell comprises the first knock-in cassette at one or both alleles of the first essential gene and the second knock-in cassette at one or both alleles of the second essential gene. In some embodiments, the genome-edited cell expresses (a) the first and second gene products of interest, and (b) the gene products encoded by the first and second essential genes required for survival and/or proliferation of the cell, or a functional variant thereof.

[0061] In another aspect, the disclosure features a donor template comprising a knock-in cassette with an exogenous coding sequence for a gene product of interest in frame with and downstream (3′) of an exogenous coding sequence or partial coding sequence of an essential gene, wherein the essential gene encodes a gene product that is required for survival and/or proliferation of the cell.

[0062] In some embodiments, the donor template is for use in editing the genome of a cell by homology-directed repair (HDR).

[0063] In some embodiments, the donor template is a donor DNA template, optionally wherein the donor DNA template is double-stranded. In some embodiments, the donor DNA template is a plasmid, optionally wherein the plasmid has not been linearized.

[0064] In some embodiments, the donor template comprises homology arms on either side of the knock-in cassette. In some embodiments, the donor template comprises a 5′ homology arm comprising a sequence homologous to a sequence located 5′ of a target site in the genome of the cell. In some embodiments, the donor template comprises a 3′ homology arm comprising a sequence homologous to a sequence located 3′ of a target site in the genome of the cell. In some embodiments, the donor template comprises a 5′ homology arm comprising a sequence homologous to a sequence located 5′ of a target site in the genome of the cell, and the donor template comprises a 3′ homology arm comprising a sequence homologous to a sequence located 3′ of a target site in the genome of the cell.

[0065] In some embodiments, the knock-in cassette comprises a regulatory element that enables expression of the gene product encoded by the essential gene and the gene product of interest as separate gene products, optionally, wherein at least one of the gene products is a protein and the regulatory element enables expression of that protein separate from the other gene product. In some embodiments, the knock-in cassette comprises an IRES or 2A element located between the exogenous coding sequence or partial coding sequence of the essential gene and the exogenous coding sequence for the gene product of interest. In some embodiments, the 2A element is a T2A element (e.g., EGRGSLLTCGDVEENPGP), a P2A element (e.g., ATNFSLLKQAGDVEENPGP), a E2A element (e.g., QCTNYALLKLAGDVESNPGP), or an F2A element (e.g., VKQTLNFDLLKLAGDVESNPGP). In some embodiments, the knock-in cassette further comprises a sequence encoding a linker peptide upstream of the 2A element. In some embodiments, the linker peptide comprises the amino acid sequence GSG.

[0066] In some embodiments, the knock-in cassette comprises a polyadenylation sequence, and optionally a 3′ UTR sequence, downstream of the exogenous coding sequence for the gene product of interest, and, if a 3′UTR sequence is present, the 3′UTR sequence is positioned 3′ of the exogenous coding sequence and 5′ of the polyadenylation sequence.

[0067] In some embodiments, the exogenous partial coding sequence of the essential gene in the knock-in cassette encodes a C-terminal fragment of a protein encoded by the essential gene. In some embodiments, the C-terminal fragment is less than about 500, 250, 150, 125, 100, 75, 50, 25, 20, 15 or 10 amino acids in length. In some embodiments, the C-terminal fragment includes an amino acid sequence that is encoded by a region of the endogenous coding sequence of the essential gene.

[0068] In some embodiments, the exogenous coding sequence or partial coding sequence of the essential gene in the knock-in cassette is less than 100% identical to the corresponding endogenous coding sequence of the essential gene of the cell. In some embodiments, the exogenous coding sequence or partial coding sequence of the essential gene in the knock-in cassette has been codon optimized relative to the corresponding endogenous coding sequence of the essential gene of the cell to remove a target site of the nuclease, to reduce the likelihood of homologous recombination after integration of the knock-in cassette into the genome of the cell, or to increase expression of the gene product of the essential gene and/or the gene product of interest after integration of the knock-in cassette into the genome of the cell.

[0069] In some embodiments, the nuclease is a Cas (e.g., Cas9 or Cas12a), the exogenous coding sequence or partial coding sequence of the essential gene in the knock-in cassette includes at least one PAM site for the Cas, and the at least one PAM site (or all PAM sites) has been codon optimized or saturated with silent and/or missense mutations.

[0070] In some embodiments, the essential gene is GAPDH, TBP, E2F4, G6PD, or KIF11.

[0071] In some embodiments, the donor template does not comprise a reporter gene, e.g., a fluorescent reporter gene or an antibiotic resistance gene.

[0072] In one aspect, the disclosure features a method of producing a population of modified cells, the method comprising contacting cells with: (i) a nuclease that causes a break within an endogenous coding sequence of an essential gene in a plurality of the cells, wherein the essential gene encodes a gene product that is required for survival and/or proliferation of the cells, and (ii) a donor template that comprises a knock-in cassette comprising an exogenous coding sequence for a gene product of interest in frame with and downstream (3′) of an exogenous coding sequence or partial coding sequence of the essential gene, wherein the knock-in cassette is integrated into the genome of a plurality of the cells by homology-directed repair (HDR) of the break, resulting in genome-edited cells that expresses: (a) the gene product of interest, and (b) the gene product encoded by the essential gene that is required for survival and/or proliferation of the plurality of cells, or a functional variant thereof, and wherein following the contacting step, at least about 60%, at least about 65%, at least about 70%, at least about 75%, at least about 80%, at least about 85%, at least about 90%, at least about 95%, or more, of the viable cells are genome-edited cells, and/or about 40% or less, about 35% or less, about 30% or less, about 25% or less, about 20% or less, about 15% or less, about 10% or less, or about 5% or less, of the cells lacking an integrated knock-in cassette are viable cells, thereby producing a population of modified cells. In some embodiments, following the contacting step, at least about 80% of the viable cells are genome-edited cells, and about 20% or less of the cells lacking an integrated knock-in cassette are viable cells. In some embodiments, following the contacting step, at least about 60% of the viable cells are genome-edited cells, and about 40% or less of the cells lacking an integrated knock-in cassette are viable cells. In some embodiments, following the contacting step, at least about 90% of the viable cells are genome-edited cells, and about 10% or less of the cells lacking an integrated knock-in cassette are viable cells. In some embodiments, following the contacting step, at least about 95% of the viable cells are genome-edited cells, and about 5% or less of cells lacking an integrated knock-in cassette are viable cells.

[0073] In some embodiments, if the knock-in cassette is not integrated into the genome of the cell by homology-directed repair (HDR) in the correct position or orientation, the cell no longer expresses the gene product encoded by the essential gene, or a functional variant thereof.

[0074] In some embodiments, the break is a double-strand break.

[0075] In some embodiments, the break is located within the last 2000, 1500, 1000, 750, 500, 400, 300, 200, 100, or 50 base pairs of the endogenous coding sequence of the essential gene. In some embodiments, the break is located within the last exon of the essential gene.

[0076] In some embodiments, the nuclease is highly efficient, e.g., capable of editing at least about 60%, at least about 65%, at least about 75%, at least about 80%, at least about 85%, at least about 90%, at least about 95%, or more, of cells contacted with the nuclease. In some embodiments, the nuclease is a zinc finger nuclease (ZFN), a transcription activator-like effector nuclease (TALEN) or a meganuclease. In some embodiments, the nuclease is a CRISPR/Cas nuclease and the method further comprises contacting the cell (or the population of cells) with a guide molecule for the CRISPR/Cas nuclease. In some embodiments, the nuclease is a Cas9 or a Cas12a nuclease, or a variant thereof (e.g., a nuclease comprising the amino acid sequence of any one of SEQ ID NOs: 58-66). In some embodiments, the guide molecule comprises a targeting domain sequence that is complementary to a portion of the endogenous coding sequence of the essential gene. In some embodiments, the guide molecule comprises a targeting domain sequence that differs by no more than 3 nucleotides from a sequence that is complementary to a portion of the endogenous coding sequence of the essential gene. In some embodiments, the guide molecule specifically binds to the portion of the endogenous coding sequence of the essential gene. In some embodiments, the guide molecule does not bind to an endogenous coding sequence of another gene, e.g., a different essential gene. In some embodiments, the guide comprises a nucleotide sequence of any one of SEQ ID NOs: 94-157 and 225-1885.

[0077] In some embodiments, the donor template is a donor DNA template, optionally wherein the donor DNA template is double-stranded. In some embodiments, the donor DNA template is a plasmid, optionally wherein the plasmid has not been linearized.

[0078] In some embodiments, the donor template comprises homology arms on either side of the knock-in cassette. In some embodiments, the donor template comprises a 5′ homology arm comprising a sequence homologous to a sequence located 5′ of the break in the genome of the cell. In some embodiments, the donor template comprises a 3′ homology arm comprising a sequence homologous to a sequence located 3′ of the break in the genome of the cell. In some embodiments, the donor template comprises a 5′ homology arm comprising a sequence homologous to a sequence located 5′ of the break in the genome of the cell, and the donor template comprises a 3′ homology arm comprising a sequence homologous to a sequence located 3′ of the break in the genome of the cell.

[0079] In some embodiments, the knock-in cassette comprises a regulatory element that enables expression of the gene product encoded by the essential gene and the gene product of interest as separate gene products, optionally, wherein at least one of the gene products is a protein and the regulatory element enables expression of that protein separate from the other gene product. In some embodiments, the knock-in cassette comprises an IRES or 2A element located between the exogenous coding sequence or partial coding sequence of the essential gene and the exogenous coding sequence for the gene product of interest. In some embodiments, the 2A element is a T2A element (e.g., EGRGSLLTCGDVEENPGP), a P2A element (e.g., ATNFSLLKQAGDVEENPGP), a E2A element (e.g., QCTNYALLKLAGDVESNPGP), or an F2A element (e.g., VKQTLNFDLLKLAGDVESNPGP). In some embodiments, the knock-in cassette further comprises a sequence encoding a linker peptide upstream of the 2A element. In some embodiments, the linker peptide comprises the amino acid sequence GSG.

[0080] In some embodiments, the knock-in cassette comprises a polyadenylation sequence, and optionally a 3′ UTR sequence, downstream of the exogenous coding sequence for the gene product of interest, and, if a 3′UTR sequence is present, the 3′UTR sequence is positioned 3′ of the exogenous coding sequence and 5′ of the polyadenylation sequence.

[0081] In some embodiments, the exogenous partial coding sequence of the essential gene in the knock-in cassette encodes a C-terminal fragment of a protein encoded by the essential gene. In some embodiments, the C-terminal fragment is less than about 500, 250, 150, 125, 100, 75, 50, 25, 20, 15 or 10 amino acids in length. In some embodiments, the C-terminal fragment includes an amino acid sequence that is encoded by a region of the endogenous coding sequence of the essential gene that spans the break.

[0082] In some embodiments, the exogenous coding sequence or partial coding sequence of the essential gene in the knock-in cassette is less than 100% identical to the corresponding endogenous coding sequence of the essential gene of the cell. In some embodiments, the exogenous coding sequence or partial coding sequence of the essential gene in the knock-in cassette has been codon optimized relative to the corresponding endogenous coding sequence of the essential gene of the cell to remove a target site of the nuclease, to reduce the likelihood of homologous recombination after integration of the knock-in cassette into the genome of the cell, or to increase expression of the gene product of the essential gene and/or the gene product of interest after integration of the knock-in cassette into the genome of the cell.

[0083] In some embodiments, the nuclease is a Cas (e.g., Cas9 or Cas12a), the exogenous coding sequence or partial coding sequence of the essential gene in the knock-in cassette includes at least one PAM site for the Cas, and the at least one PAM site (or all PAM sites) has been codon optimized or saturated with silent and/or missense mutations.

[0084] In some embodiments, the essential gene is GAPDH, TBP, E2F4, G6PD, or KIF11.

[0085] In some embodiments, the donor template does not comprise a reporter gene, e.g., a fluorescent reporter gene or an antibiotic resistance gene.

[0086] In some embodiments, the knock-in cassette is a multi-cistronic (e.g., bi-cistronic) knock-in cassette comprising exogenous coding sequences for two or more gene products of interest. In some embodiments, the knock-in cassette comprises a first exogenous coding sequence for a first gene product of interest, a linker (e.g., T2A, P2A, and/or IRES), and a second exogenous coding sequence for a second gene product of interest. In some embodiments, the genome-edited cells comprise knock-in cassettes at one or both alleles of the essential gene. In some embodiments, the genome-edited cells expresses (a) the first and second gene products of interest, and (b) the gene product encoded by the essential gene that is required for survival and/or proliferation of the cells, or a functional variant thereof.

[0087] In some embodiments, the method comprises contacting the cells (or the population of cells) with a first a donor template that comprises a first knock-in cassette comprising a first exogenous coding sequence for a first gene product of interest in frame with and downstream (3′) of an exogenous coding sequence or partial coding sequence of the essential gene, and with a second donor template that comprises a second knock-in cassette comprising a second exogenous coding sequence for a second gene product of interest in frame with and downstream (3′) of an exogenous coding sequence or partial coding sequence of the essential gene. In some embodiments, the genome-edited cells comprise the first knock-in cassette at a first allele of the essential gene and the second knock-in cassette at the second allele of the essential gene. In some embodiments, the genome-edited cells expresses (a) the first and second gene products of interest, and (b) the gene product encoded by the essential gene that is required for survival and/or proliferation of the cells, or a functional variant thereof.

[0088] In some embodiments, the method comprises contacting the cells (or the population of cells) with a first a donor template that comprises a first knock-in cassette comprising a first exogenous coding sequence for a first gene product of interest in frame with and downstream (3′) of an exogenous coding sequence or partial coding sequence of a first essential gene, and with a second donor template that comprises a second knock-in cassette comprising a second exogenous coding sequence for a second gene product of interest in frame with and downstream (3′) of an exogenous coding sequence or partial coding sequence of a second essential gene. In some embodiments, the genome-edited cells comprise the first knock-in cassette at one or both alleles of the first essential gene and the second knock-in cassette at one or both alleles of the second essential gene. In some embodiments, the genome-edited cells expresses (a) the first and second gene products of interest, and (b) the gene products encoded by the first and second essential genes required for survival and/or proliferation of the cells, or a functional variant thereof.

[0089] In another aspect, the disclosure features a method of selecting and/or identifying a cell comprising a knock-in of a gene product of interest within an endogenous coding sequence of an essential gene in the cell, the method comprising contacting a population of cells with: (i) a nuclease that causes a break within an endogenous coding sequence of an essential gene in a plurality of the cells, wherein the essential gene encodes a gene product that is required for survival and/or proliferation of the cells, and (ii) a donor template that comprises a knock-in cassette comprising an exogenous coding sequence for a gene product of interest in frame with and downstream (3′) of an exogenous coding sequence or partial coding sequence of the essential gene, wherein the knock-in cassette is integrated into the genome of a plurality of the cells by homology-directed repair (HDR) of the break, and identifying a genome-edited cell within the population of cells that expresses: (a) the gene product of interest, and (b) the gene product encoded by the essential gene that is required for survival and/or proliferation of the cell, or a functional variant thereof.

[0090] In some embodiments, following the contacting step, at least about 60%, at least about 65%, at least about 70%, at least about 75%, at least about 80%, at least about 85%, at least about 90%, at least about 95%, or more, of the viable cells of the population of cells are genome-edited cells, and/or about 40% or less, about 35% or less, about 30% or less, about 25% or less, about 20% or less, about 15% or less, about 10% or less, or about 5% or less, of the population of cells lacking an integrated knock-in cassette are viable cells. In some embodiments, following the contacting step, at least about 80% of the viable cells of the population of cells are genome-edited cells, and about 20% or less of the population of cells lacking an integrated knock-in cassette are viable cells. In some embodiments, following the contacting step, at least about 60% of the viable cells of the population of cells are genome-edited cells, and about 40% or less of the population of cells lacking an integrated knock-in cassette are viable cells. In some embodiments, following the contacting step, at least about 90% of the viable cells of the population of cells are genome-edited cells, and about 10% or less of the population of cells lacking an integrated knock-in cassette are viable cells. In some embodiments, following the contacting step, at least about 95% of the viable cells of the population of cells are genome-edited cells, and about 5% or less of the population of cells lacking an integrated knock-in cassette are viable cells.

[0091] In some embodiments, if the knock-in cassette is not integrated into the genome of the cell by homology-directed repair (HDR) in the correct position or orientation, the cell no longer expresses the gene product encoded by the essential gene, or a functional variant thereof.

[0092] In some embodiments, the break is a double-strand break.

[0093] In some embodiments, the break is located within the last 2000, 1500, 1000, 750, 500, 400, 300, 200, 100, or 50 base pairs of the endogenous coding sequence of the essential gene. In some embodiments, the break is located within the last exon of the essential gene.

[0094] In some embodiments, the nuclease is highly efficient, e.g., capable of editing at least about 60%, at least about 65%, at least about 75%, at least about 80%, at least about 85%, at least about 90%, at least about 95%, or more, of cells contacted with the nuclease. In some embodiments, the nuclease is a zinc finger nuclease (ZFN), a transcription activator-like effector nuclease (TALEN) or a meganuclease. In some embodiments, the nuclease is a CRISPR/Cas nuclease and the method further comprises contacting the cell (or the population of cells) with a guide molecule for the CRISPR/Cas nuclease. In some embodiments, the nuclease is a Cas9 or a Cas12a nuclease, or a variant thereof (e.g., a nuclease comprising the amino acid sequence of any one of SEQ ID NOs: 58-66). In some embodiments, the guide molecule comprises a targeting domain sequence that is complementary to a portion of the endogenous coding sequence of the essential gene. In some embodiments, the guide molecule comprises a targeting domain sequence that differs by no more than 3 nucleotides from a sequence that is complementary to a portion of the endogenous coding sequence of the essential gene. In some embodiments, the guide molecule specifically binds to the portion of the endogenous coding sequence of the essential gene. In some embodiments, the guide molecule does not bind to an endogenous coding sequence of another gene, e.g., a different essential gene. In some embodiments, the guide comprises a nucleotide sequence of any one of SEQ ID NOs: 94-157 and 225-1885.

[0095] In some embodiments, the donor template is a donor DNA template, optionally wherein the donor DNA template is double-stranded. In some embodiments, the donor DNA template is a plasmid, optionally wherein the plasmid has not been linearized.

[0096] In some embodiments, the donor template comprises homology arms on either side of the knock-in cassette. In some embodiments, the donor template comprises a 5′ homology arm comprising a sequence homologous to a sequence located 5′ of the break in the genome of the cell. In some embodiments, the donor template comprises a 3′ homology arm comprising a sequence homologous to a sequence located 3′ of the break in the genome of the cell. In some embodiments, the donor template comprises a 5′ homology arm comprising a sequence homologous to a sequence located 5′ of the break in the genome of the cell, and the donor template comprises a 3′ homology arm comprising a sequence homologous to a sequence located 3′ of the break in the genome of the cell.

[0097] In some embodiments, the knock-in cassette comprises a regulatory element that enables expression of the gene product encoded by the essential gene and the gene product of interest as separate gene products, optionally, wherein at least one of the gene products is a protein and the regulatory element enables expression of that protein separate from the other gene product. In some embodiments, the knock-in cassette comprises an IRES or 2A element located between the exogenous coding sequence or partial coding sequence of the essential gene and the exogenous coding sequence for the gene product of interest. In some embodiments, the 2A element is a T2A element (e.g., EGRGSLLTCGDVEENPGP), a P2A element (e.g., ATNFSLLKQAGDVEENPGP), a E2A element (e.g., QCTNYALLKLAGDVESNPGP), or an F2A element (e.g., VKQTLNFDLLKLAGDVESNPGP). In some embodiments, the knock-in cassette further comprises a sequence encoding a linker peptide upstream of the 2A element. In some embodiments, the linker peptide comprises the amino acid sequence GSG.

[0098] In some embodiments, the knock-in cassette comprises a polyadenylation sequence, and optionally a 3′ UTR sequence, downstream of the exogenous coding sequence for the gene product of interest, and, if a 3′UTR sequence is present, the 3′UTR sequence is positioned 3′ of the exogenous coding sequence and 5′ of the polyadenylation sequence.

[0099] In some embodiments, the exogenous partial coding sequence of the essential gene in the knock-in cassette encodes a C-terminal fragment of a protein encoded by the essential gene. In some embodiments, the C-terminal fragment is less than about 500, 250, 150, 125, 100, 75, 50, 25, 20, 15 or 10 amino acids in length. In some embodiments, the C-terminal fragment includes an amino acid sequence that is encoded by a region of the endogenous coding sequence of the essential gene that spans the break.

[0100] In some embodiments, the exogenous coding sequence or partial coding sequence of the essential gene in the knock-in cassette is less than 100% identical to the corresponding endogenous coding sequence of the essential gene of the cell. In some embodiments, the exogenous coding sequence or partial coding sequence of the essential gene in the knock-in cassette has been codon optimized relative to the corresponding endogenous coding sequence of the essential gene of the cell to remove a target site of the nuclease, to reduce the likelihood of homologous recombination after integration of the knock-in cassette into the genome of the cell, or to increase expression of the gene product of the essential gene and/or the gene product of interest after integration of the knock-in cassette into the genome of the cell.

[0101] In some embodiments, the nuclease is a Cas (e.g., Cas9 or Cas12a), the exogenous coding sequence or partial coding sequence of the essential gene in the knock-in cassette includes at least one PAM site for the Cas, and the at least one PAM site (or all PAM sites) has been codon optimized or saturated with silent and/or missense mutations.

[0102] In some embodiments, the essential gene is GAPDH, TBP, E2F4, G6PD, or KIF11.

[0103] In some embodiments, the donor template does not comprise a reporter gene, e.g., a fluorescent reporter gene or an antibiotic resistance gene.

[0104] In some embodiments, the knock-in cassette is a multi-cistronic (e.g., bi-cistronic) knock-in cassette comprising exogenous coding sequences for two or more gene products of interest. In some embodiments, the knock-in cassette comprises a first exogenous coding sequence for a first gene product of interest, a linker (e.g., T2A, P2A, and/or IRES), and a second exogenous coding sequence for a second gene product of interest. In some embodiments, the genome-edited cell comprises knock-in cassettes at one or both alleles of the essential gene. In some embodiments, the genome-edited cell expresses (a) the first and second gene products of interest, and (b) the gene product encoded by the essential gene that is required for survival and/or proliferation of the cell, or a functional variant thereof.

[0105] In some embodiments, the method comprises contacting the population of cells with a first a donor template that comprises a first knock-in cassette comprising a first exogenous coding sequence for a first gene product of interest in frame with and downstream (3′) of an exogenous coding sequence or partial coding sequence of the essential gene, and with a second donor template that comprises a second knock-in cassette comprising a second exogenous coding sequence for a second gene product of interest in frame with and downstream (3′) of an exogenous coding sequence or partial coding sequence of the essential gene. In some embodiments, the genome-edited cells comprises the first knock-in cassette at a first allele of the essential gene and the second knock-in cassette at the second allele of the essential gene. In some embodiments, the genome-edited cells expresses (a) the first and second gene products of interest, and (b) the gene product encoded by the essential gene that is required for survival and/or proliferation of the cell, or a functional variant thereof.

[0106] In some embodiments, the method comprises contacting the population of cells with a first a donor template that comprises a first knock-in cassette comprising a first exogenous coding sequence for a first gene product of interest in frame with and downstream (3′) of an exogenous coding sequence or partial coding sequence of a first essential gene, and with a second donor template that comprises a second knock-in cassette comprising a second exogenous coding sequence for a second gene product of interest in frame with and downstream (3′) of an exogenous coding sequence or partial coding sequence of a second essential gene. In some embodiments, the genome-edited cells comprises the first knock-in cassette at one or both alleles of the first essential gene and the second knock-in cassette at one or both alleles of the second essential gene. In some embodiments, the genome-edited cell expresses (a) the first and second gene products of interest, and (b) the gene products encoded by the first and second essential genes required for survival and/or proliferation of the cell, or a functional variant thereof.

[0107] In another aspect, the disclosure features a method of editing the genome of an induced pluripotent stem cell (iPSC) (e.g., an iPSC in a population of iPSCs), the method comprising contacting the iPSC (or the population of iPSCs) with: (i) a nuclease that causes a break within an endogenous coding sequence of a glyceraldehyde 3-phosphate dehydrogenase (GAPDH) gene in the iPSC, and (ii) a donor template that comprises a knock-in cassette comprising an exogenous coding sequence for a gene product of interest in frame with and downstream (3′) of an exogenous coding sequence or partial coding sequence of the GAPDH gene, wherein the knock-in cassette is integrated into the genome of the iPSC by homology-directed repair (HDR) of the break, resulting in a genome-edited iPSC that expresses: (a) the gene product of interest, and (b) GAPDH, or a functional variant thereof.

[0108] In some embodiments, following the contacting step, at least about 60%, at least about 65%, at least about 70%, at least about 75%, at least about 80%, at least about 85%, at least about 90%, at least about 95%, or more, of the viable iPSCs of the population of iPSCs are genome-edited iPSCs, and/or about 40% or less, about 35% or less, about 30% or less, about 25% or less, about 20% or less, about 15% or less, about 10% or less, or about 5% or less, of the population of iPSCs lacking an integrated knock-in cassette are viable iPSCs. In some embodiments, following the contacting step, at least about 80% of the viable iPSCs of the population of iPSCs are genome-edited iPSCs, and about 20% or less of the population of iPSCs lacking an integrated knock-in cassette are viable iPSCs. In some embodiments, following the contacting step, at least about 60% of the viable iPSCs of the population of iPSCs are genome-edited iPSCs, and about 40% or less of the population of iPSCs lacking an integrated knock-in cassette are viable iPSCs. In some embodiments, following the contacting step, at least about 90% of the viable iPSCs of the population of iPSCs are genome-edited iPSCs, and about 10% or less of the population of iPSCs lacking an integrated knock-in cassette are viable iPSCs. In some embodiments, following the contacting step, at least about 95% of the viable iPSCs of the population of iPSCs are genome-edited iPSCs, and about 5% or less of the population of iPSCs lacking an integrated knock-in cassette are viable iPSCs.

[0109] In some embodiments, if the knock-in cassette is not integrated into the genome of the iPSCs by homology-directed repair (HDR) in the correct position or orientation, the iPSCs no longer expresses GAPDH, or a functional variant thereof.

[0110] In some embodiments, the break is a double-strand break.

[0111] In some embodiments, the break is located within the last 2000, 1500, 1000, 750, 500, 400, 300, 200, 100, or 50 base pairs of the endogenous coding sequence of the GAPDH gene. In some embodiments, the break is located within the last 200 base pairs of the endogenous coding sequence of the GAPDH gene. In some embodiments, the break is located within the last exon of the GAPDH gene.

[0112] In some embodiments, the nuclease is highly efficient, e.g., capable of editing at least about 60%, at least about 65%, at least about 75%, at least about 80%, at least about 85%, at least about 90%, at least about 95%, or more, of iPSCs contacted with the nuclease. In some embodiments, the nuclease is a zinc finger nuclease (ZFN), a transcription activator-like effector nuclease (TALEN) or a meganuclease. In some embodiments, the nuclease is a CRISPR/Cas nuclease and the method further comprises contacting the iPSC (or the population of iPSCs) with a guide molecule for the CRISPR/Cas nuclease. In some embodiments, the nuclease is a Cas9 or a Cas12a nuclease, or a variant thereof (e.g., a nuclease comprising the amino acid sequence of any one of SEQ ID NOs: 58-66). In some embodiments, the guide molecule comprises a targeting domain sequence that is complementary to a portion of the endogenous coding sequence of the GAPDH gene. In some embodiments, the guide molecule comprises a targeting domain sequence that differs by no more than 3 nucleotides from a sequence that is complementary to a portion of the endogenous coding sequence of the GAPDH gene. In some embodiments, the guide molecule specifically binds to the portion of the endogenous coding sequence of the GAPDH gene. In some embodiments, the guide molecule does not bind to an endogenous coding sequence of another gene, e.g., a different essential gene. In some embodiments, the guide comprises a nucleotide sequence of any one of SEQ ID NOs: 94-157 and 225-1885.

[0113] In some embodiments, the donor template is a donor DNA template, optionally wherein the donor DNA template is double-stranded. In some embodiments, the donor DNA template is a plasmid, optionally wherein the plasmid has not been linearized.

[0114] In some embodiments, the donor template comprises homology arms on either side of the knock-in cassette. In some embodiments, the donor template comprises a 5′ homology arm comprising a sequence homologous to a sequence located 5′ of the break in the genome of the iPSC. In some embodiments, the donor template comprises a 3′ homology arm comprising a sequence homologous to a sequence located 3′ of the break in the genome of the iPSC. In some embodiments, the donor template comprises a 5′ homology arm comprising a sequence homologous to a sequence located 5′ of the break in the genome of the iPSC, and the donor template comprises a 3′ homology arm comprising a sequence homologous to a sequence located 3′ of the break in the genome of the iPSC.

[0115] In some embodiments, the knock-in cassette comprises a regulatory element that enables expression of GAPDH and the gene product of interest as separate gene products, optionally, wherein at least one of the gene products is a protein and the regulatory element enables expression of that protein separate from the other gene product. In some embodiments, the knock-in cassette comprises an IRES or 2A element located between the exogenous coding sequence or partial coding sequence of the GAPDH gene and the exogenous coding sequence for the gene product of interest. In some embodiments, the 2A element is a T2A element (e.g., EGRGSLLTCGDVEENPGP), a P2A element (e.g., ATNFSLLKQAGDVEENPGP), a E2A element (e.g., QCTNYALLKLAGDVESNPGP), or an F2A element (e.g., VKQTLNFDLLKLAGDVESNPGP). In some embodiments, the knock-in cassette further comprises a sequence encoding a linker peptide upstream of the 2A element. In some embodiments, the linker peptide comprises the amino acid sequence GSG.

[0116] In some embodiments, the knock-in cassette comprises a polyadenylation sequence, and optionally a 3′ UTR sequence, downstream of the exogenous coding sequence for the gene product of interest, and, if a 3′UTR sequence is present, the 3′UTR sequence is positioned 3′ of the exogenous coding sequence and 5′ of the polyadenylation sequence.

[0117] In some embodiments, the exogenous partial coding sequence of the GAPDH gene in the knock-in cassette encodes a C-terminal fragment of a protein encoded by the GAPDH gene. In some embodiments, the C-terminal fragment is less than about 500, 250, 150, 125, 100, 75, 50, 25, 20, 15 or 10 amino acids in length. In some embodiments, the C-terminal fragment is less than about 25 amino acids in length. In some embodiments, the C-terminal fragment includes an amino acid sequence that is encoded by a region of the endogenous coding sequence of the GAPDH gene that spans the break.

[0118] In some embodiments, the exogenous coding sequence or partial coding sequence of the GAPDH gene in the knock-in cassette is less than 100% identical to the corresponding endogenous coding sequence of the GAPDH gene of the iPSC. In some embodiments, the exogenous coding sequence or partial coding sequence of the GAPDH gene in the knock-in cassette has been codon optimized relative to the corresponding endogenous coding sequence of the GAPDH gene of the iPSC to remove a target site of the nuclease, to reduce the likelihood of homologous recombination after integration of the knock-in cassette into the genome of the iPSC, or to increase expression of GAPDH and/or the gene product of interest after integration of the knock-in cassette into the genome of the iPSC.

[0119] In some embodiments, the nuclease is a Cas (e.g., Cas9 or Cas12a), the exogenous coding sequence or partial coding sequence of the GAPDH gene in the knock-in cassette includes at least one PAM site for the Cas, and the at least one PAM site (or all PAM sites) has been codon optimized or saturated with silent and/or missense mutations.

[0120] In some embodiments, the donor template does not comprise a reporter gene, e.g., a fluorescent reporter gene or an antibiotic resistance gene.

[0121] In some embodiments, the knock-in cassette is a multi-cistronic (e.g., bi-cistronic) knock-in cassette comprising exogenous coding sequences for two or more gene products of interest. In some embodiments, the knock-in cassette comprises a first exogenous coding sequence for a first gene product of interest, a linker (e.g., T2A, P2A, and/or IRES), and a second exogenous coding sequence for a second gene product of interest. In some embodiments, the genome-edited iPSC comprises knock-in cassettes at one or both alleles of the GAPDH gene. In some embodiments, the genome-edited iPSC expresses (a) the first and second gene products of interest, and (b) GAPDH, or a functional variant thereof.

[0122] In some embodiments, the method comprises contacting the iPSC (or the population of iPSCs) with a first a donor template that comprises a first knock-in cassette comprising a first exogenous coding sequence for a first gene product of interest in frame with and downstream (3′) of an exogenous coding sequence or partial coding sequence of the GAPDH gene, and with a second donor template that comprises a second knock-in cassette comprising a second exogenous coding sequence for a second gene product of interest in frame with and downstream (3′) of an exogenous coding sequence or partial coding sequence of the GAPDH gene. In some embodiments, the genome-edited iPSC comprises the first knock-in cassette at a first allele of the GAPDH gene and the second knock-in cassette at the second allele of the GAPDH gene. In some embodiments, the genome-edited iPSC expresses (a) the first and second gene products of interest, and (b) GAPDH, or a functional variant thereof.

[0123] In another aspect, the disclosure features a genetically modified iPSC comprising a genome with an exogenous coding sequence for a gene product of interest in frame with and downstream (3′) of a coding sequence of a GAPDH gene, and wherein at least part of the coding sequence of the GAPDH gene comprises an exogenous coding sequence.

[0124] In some embodiments, the exogenous coding sequence of the GAPDH gene comprises about 2000, 1500, 1000, 750, 500, 400, 300, 200, 100, or 50 base pairs of the coding sequence of the GAPDH gene. In some embodiments, the exogenous coding sequence of the GAPDH gene comprises about 200 base pairs of the coding sequence of the GAPDH gene.

[0125] In some embodiments, the exogenous coding sequence of the GAPDH gene encodes a C-terminal fragment of a protein encoded by the GAPDH gene. In some embodiments, the C-terminal fragment is less than about 500, 250, 150, 125, 100, 75, 50, 25, 20, 15 or 10 amino acids in length. In some embodiments, the C-terminal fragment is less than about 25 amino acids in length. In some embodiments, the C-terminal fragment includes an amino acid sequence that is encoded by a region of the endogenous coding sequence of the GAPDH gene that spans the break.

[0126] In some embodiments, the exogenous coding sequence of the GAPDH gene is less than 100% identical to the corresponding endogenous coding sequence of the GAPDH gene of the iPSC. In some embodiments, the exogenous coding sequence of the GAPDH gene has been codon optimized relative to the corresponding endogenous coding sequence of the GAPDH gene of the iPSC to remove a target site of a nuclease, e.g., a Cas. In some embodiments, the nuclease is a Cas (e.g., Cas9 or Cas12a), the exogenous coding sequence of the GAPDH gene includes at least one PAM site for the Cas, and the at least one PAM site (or all PAM sites) has been codon optimized or saturated with silent and/or missense mutations.

[0127] In some embodiments, the iPSC's genome comprises a regulatory element that enables expression of the gene product encoded by the GAPDH gene and the gene product of interest as separate gene products, optionally, wherein at least one of the gene products is a protein and the regulatory element enables expression of that protein separate from the other gene product. In some embodiments, the iPSC's genome comprises an IRES or 2A element located between the coding sequence of the GAPDH gene and the exogenous coding sequence for the gene product of interest.

[0128] In some embodiments, the iPSC's genome comprises a polyadenylation sequence, and optionally a 3′ UTR sequence, downstream of the exogenous coding sequence for the gene product of interest, and, if a 3′UTR sequence is present, the 3′UTR sequence is positioned 3′ of the exogenous coding sequence and 5′ of the polyadenylation sequence.

[0129] In some embodiments, the iPSC's genome does not comprise a reporter gene, e.g., a fluorescent reporter gene or an antibiotic resistance gene.

[0130] In another aspect, the disclosure features an engineered iPSC comprising a genomic modification, wherein the genomic modification comprises an insertion of an exogenous knock-in cassette within an endogenous coding sequence of a GAPDH gene in the iPSC's genome, wherein the knock-in cassette comprises an exogenous coding sequence for a gene product of interest in frame with and downstream (3′) of an exogenous coding sequence or partial coding sequence encoding GAPDH, or a functional variant thereof, and wherein the iPSC expresses the gene product of interest and GAPDH, or a functional variant thereof, optionally wherein the gene product of interest and GAPDH are expressed from the endogenous GAPDH promoter.

[0131] In some embodiments, the exogenous coding sequence or partial coding sequence encoding GAPDH comprises about 2000, 1500, 1000, 750, 500, 400, 300, 200, 100, or 50 base pairs of the coding sequence of the GAPDH gene. In some embodiments, the exogenous coding sequence or partial coding sequence encoding GAPDH comprises about 200 base pairs of the coding sequence of the GAPDH gene.

[0132] In some embodiments, the exogenous coding sequence or partial coding sequence encoding GAPDH encodes a C-terminal fragment of GAPDH. In some embodiments, the C-terminal fragment is less than about 500, 250, 150, 125, 100, 75, 50, 25, 20, 15 or 10 amino acids in length. In some embodiments, the C-terminal fragment is less than about 25 amino acids in length. In some embodiments, the C-terminal fragment includes an amino acid sequence that is encoded by a region of the endogenous coding sequence of the GAPDH gene that spans the break.

[0133] In some embodiments, the exogenous coding sequence or partial coding sequence encoding GAPDH is less than 100% identical to the corresponding endogenous coding sequence of the GAPDH gene of the iPSC. In some embodiments, the exogenous coding sequence or partial coding sequence encoding GAPDH has been codon optimized relative to the corresponding endogenous coding sequence of the GAPDH gene of the iPSC to remove a target site of a nuclease, e.g., a Cas. In some embodiments, the nuclease is a Cas (e.g., Cas9 or Cas12a), the exogenous coding sequence or partial coding sequence encoding GAPDH includes at least one PAM site for the Cas, and the at least one PAM site (or all PAM sites) has been codon optimized or saturated with silent and/or missense mutations.

[0134] In some embodiments, the iPSC's genome comprises a regulatory element that enables expression of the gene product encoded by the GAPDH gene and the gene product of interest as separate gene products, optionally, wherein at least one of the gene products is a protein and the regulatory element enables expression of that protein separate from the other gene product. In some embodiments, the iPSC's genome comprises an IRES or 2A element located between the coding sequence of the GAPDH gene and the exogenous coding sequence for the gene product of interest.

[0135] In some embodiments, the iPSC's genome comprises a polyadenylation sequence, and optionally a 3′ UTR sequence, downstream of the exogenous coding sequence for the gene product of interest, and, if a 3′UTR sequence is present, the 3′UTR sequence is positioned 3′ of the exogenous coding sequence and 5′ of the polyadenylation sequence.

[0136] In some embodiments, the iPSC's genome does not comprise a reporter gene, e.g., a fluorescent reporter gene or an antibiotic resistance gene.

[0137] In some embodiments, the knock-in cassette is a multi-cistronic (e.g., bi-cistronic) knock-in cassette comprising exogenous coding sequences for two or more gene products of interest. In some embodiments, the knock-in cassette comprises a first exogenous coding sequence for a first gene product of interest, a linker (e.g., T2A, P2A, and/or IRES), and a second exogenous coding sequence for a second gene product of interest. In some embodiments, the genome-edited iPSC comprises knock-in cassettes at one or both alleles of the GAPDH gene. In some embodiments, the genome-edited iPSC expresses (a) the first and second gene products of interest, and (b) GAPDH, or a functional variant thereof.

[0138] In some embodiments, the engineered iPSC comprises a first knock-in cassette comprising a first exogenous coding sequence for a first gene product of interest in frame with and downstream (3′) of an exogenous coding sequence or partial coding sequence of the GAPDH gene, and with a second donor template that comprises a second knock-in cassette comprising a second exogenous coding sequence for a second gene product of interest in frame with and downstream (3′) of an exogenous coding sequence or partial coding sequence of the GAPDH gene. In some embodiments, the engineered iPSC comprises the first knock-in cassette at a first allele of the GAPDH gene and the second knock-in cassette at the second allele of the GAPDH gene. In some embodiments, the engineered iPSC expresses (a) the first and second gene products of interest, and (b) GAPDH, or a functional variant thereof.

[0139] In another aspect, the disclosure features an immune cell (e.g., an iNK cell or T cell) differentiated from an iPSC described herein.

[0140] In another aspect, the disclosure features any of the iPSCs (or iNK or T cell differentiated from an iPSC) described herein for use as a medicament and/or for use in the treatment of a disease, disorder or condition, e.g., a disease, disorder or condition described herein, e.g., a cancer, e.g., a cancer described herein.

[0141] In another aspect, the disclosure features an iPSC, or a population of iPSCs, produced by any of the methods described herein, or progeny thereof.

[0142] In another aspect, the disclosure features a system for editing the genome of an iPSC (or an iPSC in a population of iPSCs), the system comprising the iPSC (or the population of iPSC), a nuclease that causes a break within an endogenous coding sequence of a GAPDH gene of the iPSC, and a donor template that comprises a knock-in cassette comprising an exogenous coding sequence for a gene product of interest in frame with and downstream (3′) of an exogenous coding sequence or partial coding sequence of the GAPDH gene.

[0143] In some embodiments, after contacting the population of iPSCs with the nuclease and the donor template, at least about 60%, at least about 65%, at least about 70%, at least about 75%, at least about 80%, at least about 85%, at least about 90%, at least about 95%, or more, of the viable iPSCs of the population of iPSCs are genome-edited iPSCs, and/or about 40% or less, about 35% or less, about 30% or less, about 25% or less, about 20% or less, about 15% or less, about 10% or less, or about 5% or less, of the population of iPSCs lacking an integrated knock-in cassette are viable iPSCs. In some embodiments, after contacting the population of iPSCs with the nuclease and the donor template, at least about 80% of the viable iPSCs of the population of iPSCs are genome-edited iPSCs, and about 20% or less of the population of iPSCs lacking an integrated knock-in cassette are viable iPSCs. In some embodiments, after contacting the population of iPSCs with the nuclease and the donor template, at least about 60% of the viable iPSCs of the population of iPSCs are genome-edited iPSCs, and about 40% or less of the population of iPSCs lacking an integrated knock-in cassette are viable iPSCs. In some embodiments, after contacting the population of iPSCs with the nuclease and the donor template, at least about 90% of the viable iPSCs of the population of iPSCs are genome-edited iPSCs, and about 10% or less of the population of iPSCs lacking an integrated knock-in cassette are viable iPSCs. In some embodiments, after contacting the population of iPSCs with the nuclease and the donor template, at least about 95% of the viable iPSCs of the population of iPSCs are genome-edited iPSCs, and about 5% or less of the population of iPSCs lacking an integrated knock-in cassette are viable iPSCs.

[0144] In some embodiments, after contacting the iPSC or population of iPSCs with the nuclease and the donor template, if the knock-in cassette is not integrated into the genome of the iPSC by homology-directed repair (HDR) in the correct position or orientation, the iPSC no longer expresses GAPDH or a functional variant thereof.

[0145] In some embodiments, the break is a double-strand break.

[0146] In some embodiments, the break is located within the last 2000, 1500, 1000, 750, 500, 400, 300, 200, 100, or 50 base pairs of the endogenous coding sequence of the GAPDH gene. In some embodiments, the break is located within the last 200 base pairs of the endogenous coding sequence of the GAPDH gene. In some embodiments, the break is located within the last exon of the GAPDH gene.

[0147] In some embodiments, the nuclease is highly efficient, e.g., capable of editing at least about 60%, at least about 65%, at least about 75%, at least about 80%, at least about 85%, at least about 90%, at least about 95%, or more, of iPSCs contacted with the nuclease. In some embodiments, the nuclease is a zinc finger nuclease (ZFN), a transcription activator-like effector nuclease (TALEN) or a meganuclease. In some embodiments, the nuclease is a CRISPR/Cas nuclease and the method further comprises contacting the iPSC (or the population of iPSCs) with a guide molecule for the CRISPR/Cas nuclease. In some embodiments, the nuclease is a Cas9 or a Cas12a nuclease, or a variant thereof (e.g., a nuclease comprising the amino acid sequence of any one of SEQ ID NOs: 58-66). In some embodiments, the guide molecule comprises a targeting domain sequence that is complementary to a portion of the endogenous coding sequence of the GAPDH gene. In some embodiments, the guide molecule comprises a targeting domain sequence that differs by no more than 3 nucleotides from a sequence that is complementary to a portion of the endogenous coding sequence of the GAPDH gene. In some embodiments, the guide molecule specifically binds to the portion of the endogenous coding sequence of the GAPDH gene. In some embodiments, the guide molecule does not bind to an endogenous coding sequence of another gene, e.g., a different essential gene. In some embodiments, the guide comprises a nucleotide sequence of any one of SEQ ID NOs: 94-157 and 225-1885.

[0148] In some embodiments, the donor template is a donor DNA template, optionally wherein the donor DNA template is double-stranded. In some embodiments, the donor DNA template is a plasmid, optionally wherein the plasmid has not been linearized.

[0149] In some embodiments, the donor template comprises homology arms on either side of the knock-in cassette. In some embodiments, the donor template comprises a 5′ homology arm comprising a sequence homologous to a sequence located 5′ of the break in the genome of the iPSC. In some embodiments, the donor template comprises a 3′ homology arm comprising a sequence homologous to a sequence located 3′ of the break in the genome of the iPSC. In some embodiments, the donor template comprises a 5′ homology arm comprising a sequence homologous to a sequence located 5′ of the break in the genome of the iPSC, and the donor template comprises a 3′ homology arm comprising a sequence homologous to a sequence located 3′ of the break in the genome of the iPSC.

[0150] In some embodiments, the knock-in cassette comprises a regulatory element that enables expression of GAPDH and the gene product of interest as separate gene products, optionally, wherein at least one of the gene products is a protein and the regulatory element enables expression of that protein separate from the other gene product. In some embodiments, the knock-in cassette comprises an IRES or 2A element located between the exogenous coding sequence or partial coding sequence of the GAPDH gene and the exogenous coding sequence for the gene product of interest. In some embodiments, the 2A element is a T2A element (e.g., EGRGSLLTCGDVEENPGP), a P2A element (e.g., ATNFSLLKQAGDVEENPGP), a E2A element (e.g., QCTNYALLKLAGDVESNPGP), or an F2A element (e.g., VKQTLNFDLLKLAGDVESNPGP). In some embodiments, the knock-in cassette further comprises a sequence encoding a linker peptide upstream of the 2A element. In some embodiments, the linker peptide comprises the amino acid sequence GSG.

[0151] In some embodiments, the knock-in cassette comprises a polyadenylation sequence, and optionally a 3′ UTR sequence, downstream of the exogenous coding sequence for the gene product of interest, and, if a 3′UTR sequence is present, the 3′UTR sequence is positioned 3′ of the exogenous coding sequence and 5′ of the polyadenylation sequence.

[0152] In some embodiments, the exogenous partial coding sequence of the GAPDH gene in the knock-in cassette encodes a C-terminal fragment of GAPDH. In some embodiments, the C-terminal fragment is less than about 500, 250, 150, 125, 100, 75, 50, 25, 20, 15 or 10 amino acids in length. In some embodiments, the C-terminal fragment is less than about 25 amino acids in length. In some embodiments, the C-terminal fragment includes an amino acid sequence that is encoded by a region of the endogenous coding sequence of the GAPDH gene that spans the break.

[0153] In some embodiments, the exogenous coding sequence or partial coding sequence of the GAPDH gene in the knock-in cassette is less than 100% identical to the corresponding endogenous coding sequence of the GAPDH gene of the iPSC. In some embodiments, the exogenous coding sequence or partial coding sequence of the GAPDH gene in the knock-in cassette has been codon optimized relative to the corresponding endogenous coding sequence of the GAPDH gene of the iPSC to remove a target site of the nuclease, to reduce the likelihood of homologous recombination after integration of the knock-in cassette into the genome of the iPSC, or to increase expression of GAPDH and/or the gene product of interest after integration of the knock-in cassette into the genome of the iPSC.

[0154] In some embodiments, the nuclease is a Cas (e.g., Cas9 or Cas12a), the exogenous coding sequence or partial coding sequence of the GAPDH gene in the knock-in cassette includes at least one PAM site for the Cas, and the at least one PAM site (or all PAM sites) has been codon optimized or saturated with silent and/or missense mutations.

[0155] In some embodiments, the donor template does not comprise a reporter gene, e.g., a fluorescent reporter gene or an antibiotic resistance gene.

[0156] In some embodiments, the knock-in cassette is a multi-cistronic (e.g., bi-cistronic) knock-in cassette comprising exogenous coding sequences for two or more gene products of interest. In some embodiments, the knock-in cassette comprises a first exogenous coding sequence for a first gene product of interest, a linker (e.g., T2A, P2A, and/or IRES), and a second exogenous coding sequence for a second gene product of interest. In some embodiments, after contacting the population of iPSCs with the nuclease and the donor template, the genome-edited iPSC comprises knock-in cassettes at one or both alleles of the GAPDH gene. In some embodiments, the genome-edited iPSC expresses (a) the first and second gene products of interest, and (b) GAPDH, or a functional variant thereof.

[0157] In some embodiments, the system comprises a first a donor template that comprises a first knock-in cassette comprising a first exogenous coding sequence for a first gene product of interest in frame with and downstream (3′) of an exogenous coding sequence or partial coding sequence of the GAPDH gene, and with a second donor template that comprises a second knock-in cassette comprising a second exogenous coding sequence for a second gene product of interest in frame with and downstream (3′) of an exogenous coding sequence or partial coding sequence of the GAPDH gene. In some embodiments, after contacting the population of iPSCs with the nuclease and the donor templates, the genome-edited iPSC comprises the first knock-in cassette at a first allele of the GAPDH gene and the second knock-in cassette at the second allele of the GAPDH gene. In some embodiments, the genome-edited iPSC expresses (a) the first and second gene products of interest, and (b) GAPDH, or a functional variant thereof.

[0158] In another aspect, the disclosure features a donor template comprising a knock-in cassette with an exogenous coding sequence for a gene product of interest in frame with and downstream (3′) of an exogenous coding sequence or partial coding sequence of a GAPDH gene.

[0159] In some embodiments, the donor template is for use in editing the genome of an iPSC by homology-directed repair (HDR).

[0160] In some embodiments, the donor template is a donor DNA template, optionally wherein the donor DNA template is double-stranded. In some embodiments, the donor DNA template is a plasmid, optionally wherein the plasmid has not been linearized.

[0161] In some embodiments, the donor template comprises homology arms on either side of the knock-in cassette. In some embodiments, the donor template comprises a 5′ homology arm comprising a sequence homologous to a sequence located 5′ of a target site in the genome of the iPSC. In some embodiments, the donor template comprises a 3′ homology arm comprising a sequence homologous to a sequence located 3′ of a target site in the genome of the iPSC. In some embodiments, the donor template comprises a 5′ homology arm comprising a sequence homologous to a sequence located 5′ of a target site in the genome of the iPSC, and the donor template comprises a 3′ homology arm comprising a sequence homologous to a sequence located 3′ of a target site in the genome of the iPSC.

[0162] In some embodiments, the knock-in cassette comprises a regulatory element that enables expression of GAPDH and the gene product of interest as separate gene products, optionally, wherein at least one of the gene products is a protein and the regulatory element enables expression of that protein separate from the other gene product. In some embodiments, the knock-in cassette comprises an IRES or 2A element located between the exogenous coding sequence or partial coding sequence of the GAPDH gene and the exogenous coding sequence for the gene product of interest. In some embodiments, the 2A element is a T2A element (e.g., EGRGSLLTCGDVEENPGP), a P2A element (e.g., ATNFSLLKQAGDVEENPGP), a E2A element (e.g., QCTNYALLKLAGDVESNPGP), or an F2A element (e.g., VKQTLNFDLLKLAGDVESNPGP). In some embodiments, the knock-in cassette further comprises a sequence encoding a linker peptide upstream of the 2A element. In some embodiments, the linker peptide comprises the amino acid sequence GSG.

[0163] In some embodiments, the knock-in cassette comprises a polyadenylation sequence, and optionally a 3′ UTR sequence, downstream of the exogenous coding sequence for the gene product of interest, and, if a 3′UTR sequence is present, the 3′UTR sequence is positioned 3′ of the exogenous coding sequence and 5′ of the polyadenylation sequence.

[0164] In some embodiments, the exogenous partial coding sequence of the GAPDH gene in the knock-in cassette encodes a C-terminal fragment of GAPDH. In some embodiments, the C-terminal fragment is less than about 500, 250, 150, 125, 100, 75, 50, 25, 20, 15 or 10 amino acids in length. In some embodiments, the C-terminal fragment is less than about 25 10 amino acids in length. In some embodiments, the C-terminal fragment includes an amino acid sequence that is encoded by a region of the endogenous coding sequence of the GAPDH gene.

[0165] In some embodiments, the exogenous coding sequence or partial coding sequence of the GAPDH gene in the knock-in cassette is less than 100% identical to the corresponding endogenous coding sequence of the GAPDH gene of the iPSC. In some embodiments, the exogenous coding sequence or partial coding sequence of the GAPDH gene in the knock-in cassette has been codon optimized relative to the corresponding endogenous coding sequence of the GAPDH gene of the iPSC to remove a target site of the nuclease, to reduce the likelihood of homologous recombination after integration of the knock-in cassette into the genome of the iPSC, or to increase expression of GAPDH and/or the gene product of interest after integration of the knock-in cassette into the genome of the iPSC.

[0166] In some embodiments, the nuclease is a Cas (e.g., Cas9 or Cas12a), the exogenous coding sequence or partial coding sequence of the GAPDH gene in the knock-in cassette includes at least one PAM site for the Cas, and the at least one PAM site (or all PAM sites) has been codon optimized or saturated with silent and/or missense mutations.

[0167] In some embodiments, the donor template does not comprise a reporter gene, e.g., a fluorescent reporter gene or an antibiotic resistance gene.

[0168] In another aspect, the disclosure features a method of producing a population of modified iPSCs, the method comprising contacting iPSCs with: (i) a nuclease that causes a break within an endogenous coding sequence of a GAPDH gene in a plurality of the iPSCs, and (ii) a donor template that comprises a knock-in cassette comprising an exogenous coding sequence for a gene product of interest in frame with and downstream (3′) of an exogenous coding sequence or partial coding sequence of the GAPDH gene, wherein the knock-in cassette is integrated into the genome of a plurality of the iPSCs by homology-directed repair (HDR) of the break, resulting in genome-edited iPSCs that expresses: (a) the gene product of interest, and (b) GAPDH, or a functional variant thereof, and wherein following the contacting step, at least about 60%, at least about 65%, at least about 70%, at least about 75%, at least about 80%, at least about 85%, at least about 90%, at least about 95%, or more, of the viable iPSCs are genome-edited iPSCs, and/or about 40% or less, about 35% or less, about 30% or less, about 25% or less, about 20% or less, about 15% or less, about 10% or less, or about 5% or less, of the iPSCs lacking an integrated knock-in cassette are viable iPSCs, thereby producing a population of modified iPSCs. In some embodiments, following the contacting step, at least about 80% of the viable iPSCs are genome-edited iPSCs, and about 20% or less of the iPSCs lacking an integrated knock-in cassette are viable iPSCs. In some embodiments, following the contacting step, at least about 60% of the viable iPSCs are genome-edited iPSCs, and about 40% or less of the iPSCs lacking an integrated knock-in cassette are viable iPSCs. In some embodiments, following the contacting step, at least about 90% of the viable iPSCs are genome-edited iPSCs, and about 10% or less of the iPSCs lacking an integrated knock-in cassette are viable iPSCs. In some embodiments, following the contacting step, at least about 95% of the viable iPSCs are genome-edited iPSCs, and about 5% or less of iPSCs lacking an integrated knock-in cassette are viable iPSCs.

[0169] In some embodiments, if the knock-in cassette is not integrated into the genome of the iPSC by homology-directed repair (HDR) in the correct position or orientation, the iPSC no longer expresses GAPDH, or a functional variant thereof.

[0170] In some embodiments, the break is a double-strand break.

[0171] In some embodiments, the break is located within the last 2000, 1500, 1000, 750, 500, 400, 300, 200, 100, or 50 base pairs of the endogenous coding sequence of the GAPDH gene. In some embodiments, the break is located within the last 200 base pairs of the endogenous coding sequence of the GAPDH gene. In some embodiments, the break is located within the last exon of the GAPDH gene.

[0172] In some embodiments, the nuclease is highly efficient, e.g., capable of editing at least about 60%, at least about 65%, at least about 75%, at least about 80%, at least about 85%, at least about 90%, at least about 95%, or more, of iPSCs contacted with the nuclease. In some embodiments, the nuclease is a zinc finger nuclease (ZFN), a transcription activator-like effector nuclease (TALEN) or a meganuclease. In some embodiments, the nuclease is a CRISPR/Cas nuclease and the method further comprises contacting the iPSC (or the population of iPSCs) with a guide molecule for the CRISPR/Cas nuclease. In some embodiments, the nuclease is a Cas9 or a Cas12a nuclease, or a variant thereof (e.g., a nuclease comprising the amino acid sequence of any one of SEQ ID NOs: 58-66). In some embodiments, the guide molecule comprises a targeting domain sequence that is complementary to a portion of the endogenous coding sequence of the GAPDH gene. In some embodiments, the guide molecule comprises a targeting domain sequence that differs by no more than 3 nucleotides from a sequence that is complementary to a portion of the endogenous coding sequence of the GAPDH gene. In some embodiments, the guide molecule specifically binds to the portion of the endogenous coding sequence of the GAPDH gene. In some embodiments, the guide molecule does not bind to an endogenous coding sequence of another gene, e.g., a different essential gene. In some embodiments, the guide comprises a nucleotide sequence of any one of SEQ ID NOs: 94-157 and 225-1885.

[0173] In some embodiments, the donor template is a donor DNA template, optionally wherein the donor DNA template is double-stranded. In some embodiments, the donor DNA template is a plasmid, optionally wherein the plasmid has not been linearized.

[0174] In some embodiments, the donor template comprises homology arms on either side of the knock-in cassette. In some embodiments, the donor template comprises a 5′ homology arm comprising a sequence homologous to a sequence located 5′ of the break in the genome of the iPSC. In some embodiments, the donor template comprises a 3′ homology arm comprising a sequence homologous to a sequence located 3′ of the break in the genome of the iPSC. In some embodiments, the donor template comprises a 5′ homology arm comprising a sequence homologous to a sequence located 5′ of the break in the genome of the iPSC, and the donor template comprises a 3′ homology arm comprising a sequence homologous to a sequence located 3′ of the break in the genome of the iPSC.

[0175] In some embodiments, the knock-in cassette comprises a regulatory element that enables expression of GAPDH and the gene product of interest as separate gene products, optionally, wherein at least one of the gene products is a protein and the regulatory element enables expression of that protein separate from the other gene product. In some embodiments, the knock-in cassette comprises an IRES or 2A element located between the exogenous coding sequence or partial coding sequence of the GAPDH gene and the exogenous coding sequence for the gene product of interest. In some embodiments, the 2A element is a T2A element (e.g., EGRGSLLTCGDVEENPGP), a P2A element (e.g., ATNFSLLKQAGDVEENPGP), a E2A element (e.g., QCTNYALLKLAGDVESNPGP), or an F2A element (e.g., VKQTLNFDLLKLAGDVESNPGP). In some embodiments, the knock-in cassette further comprises a sequence encoding a linker peptide upstream of the 2A element. In some embodiments, the linker peptide comprises the amino acid sequence GSG.

[0176] In some embodiments, the knock-in cassette comprises a polyadenylation sequence, and optionally a 3′ UTR sequence, downstream of the exogenous coding sequence for the gene product of interest, and, if a 3′UTR sequence is present, the 3′UTR sequence is positioned 3′ of the exogenous coding sequence and 5′ of the polyadenylation sequence.

[0177] In some embodiments, the exogenous partial coding sequence of the GAPDH gene in the knock-in cassette encodes a C-terminal fragment of GAPDH. In some embodiments, the C-terminal fragment is less than about 500, 250, 150, 125, 100, 75, 50, 25, 20, 15 or 10 amino acids in length. In some embodiments, the C-terminal fragment is less than about 25 amino acids in length. In some embodiments, the C-terminal fragment includes an amino acid sequence that is encoded by a region of the endogenous coding sequence of the GAPDH gene that spans the break.

[0178] In some embodiments, the exogenous coding sequence or partial coding sequence of the GAPDH gene in the knock-in cassette is less than 100% identical to the corresponding endogenous coding sequence of the GAPDH gene of the iPSC. In some embodiments, the exogenous coding sequence or partial coding sequence of the GAPDH gene in the knock-in cassette has been codon optimized relative to the corresponding endogenous coding sequence of the GAPDH gene of the iPSC to remove a target site of the nuclease, to reduce the likelihood of homologous recombination after integration of the knock-in cassette into the genome of the iPSC, or to increase expression of GAPDH and/or the gene product of interest after integration of the knock-in cassette into the genome of the iPSC.

[0179] In some embodiments, the nuclease is a Cas (e.g., Cas9 or Cas12a), the exogenous coding sequence or partial coding sequence of the GAPDH gene in the knock-in cassette includes at least one PAM site for the Cas, and the at least one PAM site (or all PAM sites) has been codon optimized or saturated with silent and/or missense mutations.

[0180] In some embodiments, the donor template does not comprise a reporter gene, e.g., a fluorescent reporter gene or an antibiotic resistance gene.

[0181] In some embodiments, the knock-in cassette is a multi-cistronic (e.g., bi-cistronic) knock-in cassette comprising exogenous coding sequences for two or more gene products of interest. In some embodiments, the knock-in cassette comprises a first exogenous coding sequence for a first gene product of interest, a linker (e.g., T2A, P2A, and/or IRES), and a second exogenous coding sequence for a second gene product of interest. In some embodiments, the genome-edited iPSCs comprise knock-in cassettes at one or both alleles of the GAPDH gene. In some embodiments, the genome-edited iPSCs express (a) the first and second gene products of interest, and (b) GAPDH, or a functional variant thereof.

[0182] In some embodiments, the method comprises contacting iPSCs (or the population of iPSCs) with a first a donor template that comprises a first knock-in cassette comprising a first exogenous coding sequence for a first gene product of interest in frame with and downstream (3′) of an exogenous coding sequence or partial coding sequence of the GAPDH gene, and with a second donor template that comprises a second knock-in cassette comprising a second exogenous coding sequence for a second gene product of interest in frame with and downstream (3′) of an exogenous coding sequence or partial coding sequence of the GAPDH gene. In some embodiments, the genome-edited iPSCs comprise the first knock-in cassette at a first allele of the GAPDH gene and the second knock-in cassette at the second allele of the GAPDH gene. In some embodiments, the genome-edited iPSCs express (a) the first and second gene products of interest, and (b) GAPDH, or a functional variant thereof.

[0183] In another aspect, the disclosure features a method of selecting and/or identifying an iPSC comprising a knock-in of a gene product of interest within an endogenous coding sequence of a GAPDH gene in the iPSC, the method comprising contacting a population of iPSCs with: (i) a nuclease that causes a break within an endogenous coding sequence of a GAPDH gene in a plurality of the iPSCs, and (ii) a donor template that comprises a knock-in cassette comprising an exogenous coding sequence for a gene product of interest in frame with and downstream (3′) of an exogenous coding sequence or partial coding sequence of the GAPDH gene, wherein the knock-in cassette is integrated into the genome of a plurality of the iPSCs by homology-directed repair (HDR) of the break, and identifying a genome-edited iPSC within the population of iPSCs that expresses: (a) the gene product of interest, and (b) GAPDH, or a functional variant thereof.

[0184] In some embodiments, following the contacting step, at least about 60%, at least about 65%, at least about 70%, at least about 75%, at least about 80%, at least about 85%, at least about 90%, at least about 95%, or more, of the viable iPSCs of the population of iPSCs are genome-edited iPSCs, and/or about 40% or less, about 35% or less, about 30% or less, about 25% or less, about 20% or less, about 15% or less, about 10% or less, or about 5% or less, of the population of iPSCs lacking an integrated knock-in cassette are iPSCs. In some embodiments, following the contacting step, at least about 80% of the viable iPSCs of the population of iPSCs are genome-edited iPSCs, and about 20% or less of the population of iPSCs lacking an integrated knock-in cassette are viable iPSCs. In some embodiments, following the contacting step, at least about 60% of the viable iPSCs of the population of iPSCs are genome-edited iPSCs, and about 40% or less of the population of iPSCs lacking an integrated knock-in cassette are viable iPSCs. In some embodiments, following the contacting step, at least about 90% of the viable iPSCs of the population of iPSCs are genome-edited iPSCs, and about 10% or less of the population of iPSCs lacking an integrated knock-in cassette are viable iPSCs. In some embodiments, following the contacting step, at least about 95% of the viable iPSCs of the population of iPSCs are genome-edited iPSCs, and about 5% or less of the population of iPSCs lacking an integrated knock-in cassette are viable iPSCs.

[0185] In some embodiments, if the knock-in cassette is not integrated into the genome of the iPSC by homology-directed repair (HDR) in the correct position or orientation, the iPSC no longer expresses GAPDH, or a functional variant thereof.

[0186] In some embodiments, the break is a double-strand break.

[0187] In some embodiments, the break is located within the last 2000, 1500, 1000, 750, 500, 400, 300, 200, 100, or 50 base pairs of the endogenous coding sequence of the GAPDH gene. In some embodiments, the break is located within the last 200 base pairs of the endogenous coding sequence of the GAPDH gene. In some embodiments, the break is located within the last exon of the GAPDH gene.

[0188] In some embodiments, the nuclease is highly efficient, e.g., capable of editing at least about 60%, at least about 65%, at least about 75%, at least about 80%, at least about 85%, at least about 90%, at least about 95%, or more, of iPSCs contacted with the nuclease. In some embodiments, the nuclease is a zinc finger nuclease (ZFN), a transcription activator-like effector nuclease (TALEN) or a meganuclease. In some embodiments, the nuclease is a CRISPR/Cas nuclease and the method further comprises contacting the iPSC (or the population of iPSCs) with a guide molecule for the CRISPR/Cas nuclease. In some embodiments, the nuclease is a Cas9 or a Cas12a nuclease, or a variant thereof (e.g., a nuclease comprising the amino acid sequence of any one of SEQ ID NOs: 58-66). In some embodiments, the guide molecule comprises a targeting domain sequence that is complementary to a portion of the endogenous coding sequence of the GAPDH gene. In some embodiments, the guide molecule comprises a targeting domain sequence that differs by no more than 3 nucleotides from a sequence that is complementary to a portion of the endogenous coding sequence of the GAPDH gene. In some embodiments, the guide molecule specifically binds to the portion of the endogenous coding sequence of the GAPDH gene. In some embodiments, the guide molecule does not bind to an endogenous coding sequence of another gene, e.g., a different essential gene. In some embodiments, the guide comprises a nucleotide sequence of any one of SEQ ID NOs: 94-157 and 225-1885.

[0189] In some embodiments, the donor template is a donor DNA template, optionally wherein the donor DNA template is double-stranded. In some embodiments, the donor DNA template is a plasmid, optionally wherein the plasmid has not been linearized.

[0190] In some embodiments, the donor template comprises homology arms on either side of the knock-in cassette. In some embodiments, the donor template comprises a 5′ homology arm comprising a sequence homologous to a sequence located 5′ of the break in the genome of the iPSC. In some embodiments, the donor template comprises a 3′ homology arm comprising a sequence homologous to a sequence located 3′ of the break in the genome of the iPSC. In some embodiments, the donor template comprises a 5′ homology arm comprising a sequence homologous to a sequence located 5′ of the break in the genome of the iPSC, and the donor template comprises a 3′ homology arm comprising a sequence homologous to a sequence located 3′ of the break in the genome of the iPSC.

[0191] In some embodiments, the knock-in cassette comprises a regulatory element that enables expression of GAPDH and the gene product of interest as separate gene products, optionally, wherein at least one of the gene products is a protein and the regulatory element enables expression of that protein separate from the other gene product. In some embodiments, the knock-in cassette comprises an IRES or 2A element located between the exogenous coding sequence or partial coding sequence of the GAPDH gene and the exogenous coding sequence for the gene product of interest. In some embodiments, the 2A element is a T2A element (e.g., EGRGSLLTCGDVEENPGP), a P2A element (e.g., ATNFSLLKQAGDVEENPGP), a E2A element (e.g., QCTNYALLKLAGDVESNPGP), or an F2A element (e.g., VKQTLNFDLLKLAGDVESNPGP). In some embodiments, the knock-in cassette further comprises a sequence encoding a linker peptide upstream of the 2A element. In some embodiments, the linker peptide comprises the amino acid sequence GSG.

[0192] In some embodiments, the knock-in cassette comprises a polyadenylation sequence, and optionally a 3′ UTR sequence, downstream of the exogenous coding sequence for the gene product of interest, and, if a 3′UTR sequence is present, the 3′UTR sequence is positioned 3′ of the exogenous coding sequence and 5′ of the polyadenylation sequence.

[0193] In some embodiments, the exogenous partial coding sequence of the GAPDH gene in the knock-in cassette encodes a C-terminal fragment of GAPDH. In some embodiments, the C-terminal fragment is less than about 500, 250, 150, 125, 100, 75, 50, 25, 20, 15 or 10 amino acids in length. In some embodiments, the C-terminal fragment is less than about 25 amino acids in length. In some embodiments, the C-terminal fragment includes an amino acid sequence that is encoded by a region of the endogenous coding sequence of the GAPDH gene that spans the break.

[0194] In some embodiments, the exogenous coding sequence or partial coding sequence of the GAPDH gene in the knock-in cassette is less than 100% identical to the corresponding endogenous coding sequence of the GAPDH gene of the iPSC. In some embodiments, the exogenous coding sequence or partial coding sequence of the GAPDH gene in the knock-in cassette has been codon optimized relative to the corresponding endogenous coding sequence of the GAPDH gene of the iPSC to remove a target site of the nuclease, to reduce the likelihood of homologous recombination after integration of the knock-in cassette into the genome of the iPSC, or to increase expression of GAPDH and/or the gene product of interest after integration of the knock-in cassette into the genome of the iPSC.

[0195] In some embodiments, the nuclease is a Cas (e.g., Cas9 or Cas12a), the exogenous coding sequence or partial coding sequence of the GAPDH gene in the knock-in cassette includes at least one PAM site for the Cas, and the at least one PAM site (or all PAM sites) has been codon optimized or saturated with silent and/or missense mutations.

[0196] In some embodiments, the donor template does not comprise a reporter gene, e.g., a fluorescent reporter gene or an antibiotic resistance gene.

[0197] In some embodiments, the knock-in cassette is a multi-cistronic (e.g., bi-cistronic) knock-in cassette comprising exogenous coding sequences for two or more gene products of interest. In some embodiments, the knock-in cassette comprises a first exogenous coding sequence for a first gene product of interest, a linker (e.g., T2A, P2A, and/or IRES), and a second exogenous coding sequence for a second gene product of interest. In some embodiments, the genome-edited iPSC comprises knock-in cassettes at one or both alleles of the GAPDH gene. In some embodiments, the genome-edited iPSC expresses (a) the first and second gene products of interest, and (b) GAPDH, or a functional variant thereof.

[0198] In some embodiments, the method comprises contacting the population of iPSCs with a first a donor template that comprises a first knock-in cassette comprising a first exogenous coding sequence for a first gene product of interest in frame with and downstream (3′) of an exogenous coding sequence or partial coding sequence of the GAPDH gene, and with a second donor template that comprises a second knock-in cassette comprising a second exogenous coding sequence for a second gene product of interest in frame with and downstream (3′) of an exogenous coding sequence or partial coding sequence of the GAPDH gene. In some embodiments, the genome-edited iPSCs comprise the first knock-in cassette at a first allele of the GAPDH gene and the second knock-in cassette at the second allele of the GAPDH gene. In some embodiments, the genome-edited iPSCs express (a) the first and second gene products of interest, and (b) GAPDH, or a functional variant thereof.

[0199] In another aspect, the disclosure features a method of editing the genome of an induced pluripotent stem cell (iPSC) (e.g., an iPSC in a population of iPSCs), the method comprising contacting the iPSC (or the population of iPSCs) with: (i) a nuclease that causes a break within an endogenous coding sequence of a glyceraldehyde 3-phosphate dehydrogenase (GAPDH) gene in the iPSC, and (ii) a donor template that comprises a knock-in cassette comprising an exogenous coding sequence for a gene product of interest in frame with and downstream (3′) of an exogenous coding sequence or partial coding sequence of the GAPDH gene, wherein the knock-in cassette is integrated into the genome of the iPSC by homology-directed repair (HDR) of the break, resulting in a genome-edited iPSC that expresses: (a) the gene product of interest, and (b) GAPDH, or a functional variant thereof, wherein the gene product of interest is a chimeric antigen receptor (CAR), a non-naturally occurring variant of FcγRIII (CD16), interleukin 15 (IL-15), interleukin 15 receptor (IL-15R) or a variant thereof, interleukin 12 (IL-12), interleukin-12 receptor (IL-12R) or a variant thereof, human leukocyte antigen G (HLA-G), human leukocyte antigen E (HLA-E), leukocyte surface antigen cluster of differentiation CD47 (CD47), or any combination of two or more thereof.

[0200] In some embodiments, following the contacting step, at least about 60%, at least about 65%, at least about 70%, at least about 75%, at least about 80%, at least about 85%, at least about 90%, at least about 95%, or more, of the viable iPSCs of the population of iPSCs are genome-edited iPSCs, and/or about 40% or less, about 35% or less, about 30% or less, about 25% or less, about 20% or less, about 15% or less, about 10% or less, or about 5% or less, of the population of iPSCs lacking an integrated knock-in cassette are viable iPSCs. In some embodiments, following the contacting step, at least about 80% of the viable iPSCs of the population of iPSCs are genome-edited iPSCs, and about 20% or less of the population of iPSCs lacking an integrated knock-in cassette are viable iPSCs. In some embodiments, following the contacting step, at least about 60% of the viable iPSCs of the population of iPSCs are genome-edited iPSCs, and about 40% or less of the population of iPSCs lacking an integrated knock-in cassette are viable iPSCs. In some embodiments, following the contacting step, at least about 90% of the viable iPSCs of the population of iPSCs are genome-edited iPSCs, and about 10% or less of the population of iPSCs lacking an integrated knock-in cassette are viable iPSCs. In some embodiments, following the contacting step, at least about 95% of the viable iPSCs of the population of iPSCs are genome-edited iPSCs, and about 5% or less of the population of iPSCs lacking an integrated knock-in cassette are viable iPSCs.

[0201] In some embodiments, if the knock-in cassette is not integrated into the genome of the iPSCs by homology-directed repair (HDR) in the correct position or orientation, the iPSCs no longer expresses GAPDH, or a functional variant thereof.

[0202] In some embodiments, the break is a double-strand break.

[0203] In some embodiments, the break is located within the last 2000, 1500, 1000, 750, 500, 400, 300, 200, 100, or 50 base pairs of the endogenous coding sequence of the GAPDH gene. In some embodiments, the break is located within the last 200 base pairs of the endogenous coding sequence of the GAPDH gene. In some embodiments, the break is located within the last exon of the GAPDH gene.

[0204] In some embodiments, the nuclease is highly efficient, e.g., capable of editing at least about 60%, at least about 65%, at least about 75%, at least about 80%, at least about 85%, at least about 90%, at least about 95%, or more, of iPSCs contacted with the nuclease. In some embodiments, the nuclease is a zinc finger nuclease (ZFN), a transcription activator-like effector nuclease (TALEN) or a meganuclease. In some embodiments, the nuclease is a CRISPR/Cas nuclease and the method further comprises contacting the iPSC (or the population of iPSCs) with a guide molecule for the CRISPR/Cas nuclease. In some embodiments, the nuclease is a Cas9 or a Cas12a nuclease, or a variant thereof (e.g., a nuclease comprising the amino acid sequence of any one of SEQ ID NOs: 58-66). In some embodiments, the guide molecule comprises a targeting domain sequence that is complementary to a portion of the endogenous coding sequence of the GAPDH gene. In some embodiments, the guide molecule comprises a targeting domain sequence that differs by no more than 3 nucleotides from a sequence that is complementary to a portion of the endogenous coding sequence of the GAPDH gene. In some embodiments, the guide molecule specifically binds to the portion of the endogenous coding sequence of the GAPDH gene. In some embodiments, the guide molecule does not bind to an endogenous coding sequence of another gene, e.g., a different essential gene. In some embodiments, the guide comprises a nucleotide sequence of any one of SEQ ID NOs: 94-157 and 225-1885.

[0205] In some embodiments, the donor template is a donor DNA template, optionally wherein the donor DNA template is double-stranded. In some embodiments, the donor DNA template is a plasmid, optionally wherein the plasmid has not been linearized.

[0206] In some embodiments, the donor template comprises homology arms on either side of the knock-in cassette. In some embodiments, the donor template comprises a 5′ homology arm comprising a sequence homologous to a sequence located 5′ of the break in the genome of the iPSC. In some embodiments, the donor template comprises a 3′ homology arm comprising a sequence homologous to a sequence located 3′ of the break in the genome of the iPSC. In some embodiments, the donor template comprises a 5′ homology arm comprising a sequence homologous to a sequence located 5′ of the break in the genome of the iPSC, and the donor template comprises a 3′ homology arm comprising a sequence homologous to a sequence located 3′ of the break in the genome of the iPSC.

[0207] In some embodiments, the knock-in cassette comprises a regulatory element that enables expression of GAPDH and the gene product of interest as separate gene products, optionally, wherein at least one of the gene products is a protein and the regulatory element enables expression of that protein separate from the other gene product. In some embodiments, the knock-in cassette comprises an IRES or 2A element located between the exogenous coding sequence or partial coding sequence of the GAPDH gene and the exogenous coding sequence for the gene product of interest. In some embodiments, the 2A element is a T2A element (e.g., EGRGSLLTCGDVEENPGP), a P2A element (e.g., ATNFSLLKQAGDVEENPGP), a E2A element (e.g., QCTNYALLKLAGDVESNPGP), or an F2A element (e.g., VKQTLNFDLLKLAGDVESNPGP). In some embodiments, the knock-in cassette further comprises a sequence encoding a linker peptide upstream of the 2A element. In some embodiments, the linker peptide comprises the amino acid sequence GSG.

[0208] In some embodiments, the knock-in cassette comprises a polyadenylation sequence, and optionally a 3′ UTR sequence, downstream of the exogenous coding sequence for the gene product of interest, and, if a 3′UTR sequence is present, the 3′UTR sequence is positioned 3′ of the exogenous coding sequence and 5′ of the polyadenylation sequence.

[0209] In some embodiments, the exogenous partial coding sequence of the GAPDH gene in the knock-in cassette encodes a C-terminal fragment of a protein encoded by the GAPDH gene. In some embodiments, the C-terminal fragment is less than about 500, 250, 150, 125, 100, 75, 50, 25, 20, 15 or 10 amino acids in length. In some embodiments, the C-terminal fragment is less than about 25 amino acids in length. In some embodiments, the C-terminal fragment includes an amino acid sequence that is encoded by a region of the endogenous coding sequence of the GAPDH gene that spans the break.

[0210] In some embodiments, the exogenous coding sequence or partial coding sequence of the GAPDH gene in the knock-in cassette is less than 100% identical to the corresponding endogenous coding sequence of the GAPDH gene of the iPSC. In some embodiments, the exogenous coding sequence or partial coding sequence of the GAPDH gene in the knock-in cassette has been codon optimized relative to the corresponding endogenous coding sequence of the GAPDH gene of the iPSC to remove a target site of the nuclease, to reduce the likelihood of homologous recombination after integration of the knock-in cassette into the genome of the iPSC, or to increase expression of GAPDH and/or the gene product of interest after integration of the knock-in cassette into the genome of the iPSC.

[0211] In some embodiments, the nuclease is a Cas (e.g., Cas9 or Cas12a), the exogenous coding sequence or partial coding sequence of the GAPDH gene in the knock-in cassette includes at least one PAM site for the Cas, and the at least one PAM site (or all PAM sites) has been codon optimized or saturated with silent and/or missense mutations.

[0212] In some embodiments, the donor template does not comprise a reporter gene, e.g., a fluorescent reporter gene or an antibiotic resistance gene.

[0213] In some embodiments, the knock-in cassette is a multi-cistronic (e.g., bi-cistronic) knock-in cassette comprising exogenous coding sequences for two or more gene products of interest. In some embodiments, the knock-in cassette comprises a first exogenous coding sequence for a first gene product of interest, a linker (e.g., T2A, P2A, and/or IRES), and a second exogenous coding sequence for a second gene product of interest. In some embodiments, the genome-edited iPSC comprises knock-in cassettes at one or both alleles of the GAPDH gene. In some embodiments, the genome-edited iPSC expresses (a) the first and second gene products of interest, and (b) GAPDH, or a functional variant thereof.

[0214] In some embodiments, the method comprises contacting the iPSC (or the population of iPSCs) with a first a donor template that comprises a first knock-in cassette comprising a first exogenous coding sequence for a first gene product of interest in frame with and downstream (3′) of an exogenous coding sequence or partial coding sequence of the GAPDH gene, and with a second donor template that comprises a second knock-in cassette comprising a second exogenous coding sequence for a second gene product of interest in frame with and downstream (3′) of an exogenous coding sequence or partial coding sequence of the GAPDH gene. In some embodiments, the genome-edited iPSC comprises the first knock-in cassette at a first allele of the GAPDH gene and the second knock-in cassette at the second allele of the GAPDH gene. In some embodiments, the genome-edited iPSC expresses (a) the first and second gene products of interest, and (b) GAPDH, or a functional variant thereof.

[0215] In some embodiments, the genome-edited iPSC comprises multi-cistronic knock-ins (e.g., at one or both alleles of GAPDH gene) of two or more gene products of interest, e.g., one or more of the following gene products of interest, in order: CD16+IL15; IL15+CD16; CD16+CAR; CAR+CD16; IL15+CAR; CAR+IL15; CD16+(HLA-E or HLA-G or CD47); (HLA-E or HLA-G or CD47)+CD16; IL15+(HLA-E or HLA-G or CD47); (HLA-E or HLA-G or CD47)+IL15; CAR+(HLA-E or HLA-G or CD47); (HLA-E or HLA-G or CD47)+CAR. In some embodiments, the genome-edited iPSC comprises bi-allelic knock-ins (e.g., a first gene product of interest at a first allele of GAPDH gene, and a second gene product of interest at a second allele of GAPDH gene) of the following pairs of gene products of interest: CD16+IL15; IL15+CD16; CD16+CAR; CAR+CD16; IL15+CAR; CAR+IL15; CD16+(HLA-E or HLA-G or CD47); (HLA-E or HLA-G or CD47)+CD16; IL15+(HLA-E or HLA-G or CD47); (HLA-E or HLA-G or CD47)+IL15; CAR+(HLA-E or HLA-G or CD47); (HLA-E or HLA-G or CD47)+CAR.

[0216] In some embodiments, the method comprises contacting the iPSC (or the population of iPSCs) with a first a donor template that comprises a first knock-in cassette comprising a first exogenous coding sequence for a first gene product of interest in frame with and downstream (3′) of an exogenous coding sequence or partial coding sequence of a GAPDH gene, and with a second donor template that comprises a second knock-in cassette comprising a second exogenous coding sequence for a second gene product of interest in frame with and downstream (3′) of an exogenous coding sequence or partial coding sequence of a second essential gene. In some embodiments, the genome-edited iPSC comprises the first knock-in cassette at one or both alleles of the GAPDH gene and the second knock-in cassette at one or both alleles of the second essential gene. In some embodiments, the genome-edited iPSC expresses (a) the first and second gene products of interest, (b) GAPDH, and (c) the gene product encoded by the second essential gene required for survival and/or proliferation of the iPSC, or a functional variant thereof. In some embodiments, the second essential gene is a gene listed in Table 3 or 4. In some embodiments, the second essential gene is TBP.

[0217] In another aspect, the disclosure features a genetically modified iPSC comprising a genome with an exogenous coding sequence for a gene product of interest in frame with and downstream (3′) of a coding sequence of a GAPDH gene, wherein at least part of the coding sequence of the GAPDH gene comprises an exogenous coding sequence, and wherein the gene product of interest is a chimeric antigen receptor (CAR), a non-naturally occurring variant of FcγRIII (CD16), interleukin 15 (IL-15), interleukin 15 receptor (IL-15R) or a variant thereof, interleukin 12 (IL-12), interleukin-12 receptor (IL-12R) or a variant thereof, human leukocyte antigen G (HLA-G), human leukocyte antigen E (HLA-E), leukocyte surface antigen cluster of differentiation CD47 (CD47), or any combination of two or more thereof.

[0218] In some embodiments, the exogenous coding sequence of the GAPDH gene comprises about 2000, 1500, 1000, 750, 500, 400, 300, 200, 100, or 50 base pairs of the coding sequence of the GAPDH gene. In some embodiments, the exogenous coding sequence of the GAPDH gene comprises about 200 base pairs of the coding sequence of the GAPDH gene.

[0219] In some embodiments, the exogenous coding sequence of the GAPDH gene encodes a C-terminal fragment of a protein encoded by the GAPDH gene. In some embodiments, the C-terminal fragment is less than about 500, 250, 150, 125, 100, 75, 50, 25, 20, 15 or 10 amino acids in length. In some embodiments, the C-terminal fragment is less than about 25 amino acids in length. In some embodiments, the C-terminal fragment includes an amino acid sequence that is encoded by a region of the endogenous coding sequence of the GAPDH gene that spans the break.

[0220] In some embodiments, the exogenous coding sequence of the GAPDH gene is less than 100% identical to the corresponding endogenous coding sequence of the GAPDH gene of the iPSC. In some embodiments, the exogenous coding sequence of the GAPDH gene has been codon optimized relative to the corresponding endogenous coding sequence of the GAPDH gene of the iPSC to remove a target site of a nuclease, e.g., a Cas. In some embodiments, the nuclease is a Cas (e.g., Cas9 or Cas12a), the exogenous coding sequence of the GAPDH gene includes at least one PAM site for the Cas, and the at least one PAM site (or all PAM sites) has been codon optimized or saturated with silent and/or missense mutations.

[0221] In some embodiments, the iPSC's genome comprises a regulatory element that enables expression of the gene product encoded by the GAPDH gene and the gene product of interest as separate gene products, optionally, wherein at least one of the gene products is a protein and the regulatory element enables expression of that protein separate from the other gene product. In some embodiments, the iPSC's genome comprises an IRES or 2A element located between the coding sequence of the GAPDH gene and the exogenous coding sequence for the gene product of interest.

[0222] In some embodiments, the iPSC's genome comprises a polyadenylation sequence, and optionally a 3′ UTR sequence, downstream of the exogenous coding sequence for the gene product of interest, and, if a 3′UTR sequence is present, the 3′UTR sequence is positioned 3′ of the exogenous coding sequence and 5′ of the polyadenylation sequence.

[0223] In some embodiments, the iPSC's genome does not comprise a reporter gene, e.g., a fluorescent reporter gene or an antibiotic resistance gene.

[0224] In another aspect, the disclosure features an engineered iPSC comprising a genomic modification, wherein the genomic modification comprises an insertion of an exogenous knock-in cassette within an endogenous coding sequence of a GAPDH gene in the iPSC's genome, wherein the knock-in cassette comprises an exogenous coding sequence for a gene product of interest in frame with and downstream (3′) of an exogenous coding sequence or partial coding sequence encoding GAPDH, or a functional variant thereof, wherein the iPSC expresses the gene product of interest and GAPDH, or a functional variant thereof, optionally wherein the gene product of interest and GAPDH are expressed from the endogenous GAPDH promoter, and wherein the gene product of interest is a chimeric antigen receptor (CAR), a non-naturally occurring variant of FcγRIII (CD16), interleukin 15 (IL-15), interleukin 15 receptor (IL-15R) or a variant thereof, interleukin 12 (IL-12), interleukin-12 receptor (IL-12R) or a variant thereof, human leukocyte antigen G (HLA-G), human leukocyte antigen E (HLA-E), leukocyte surface antigen cluster of differentiation CD47 (CD47), or any combination of two or more thereof.

[0225] In some embodiments, the exogenous coding sequence or partial coding sequence encoding GAPDH comprises about 2000, 1500, 1000, 750, 500, 400, 300, 200, 100, or 50 base pairs of the coding sequence of the GAPDH gene. In some embodiments, the exogenous coding sequence or partial coding sequence encoding GAPDH comprises about 200 base pairs of the coding sequence of the GAPDH gene.

[0226] In some embodiments, the exogenous coding sequence or partial coding sequence encoding GAPDH encodes a C-terminal fragment of GAPDH. In some embodiments, the C-terminal fragment is less than about 500, 250, 150, 125, 100, 75, 50, 25, 20, 15 or 10 amino acids in length. In some embodiments, the C-terminal fragment is less than about 25 amino acids in length. In some embodiments, the C-terminal fragment includes an amino acid sequence that is encoded by a region of the endogenous coding sequence of the GAPDH gene that spans the break.

[0227] In some embodiments, the exogenous coding sequence or partial coding sequence encoding GAPDH is less than 100% identical to the corresponding endogenous coding sequence of the GAPDH gene of the iPSC. In some embodiments, the exogenous coding sequence or partial coding sequence encoding GAPDH has been codon optimized relative to the corresponding endogenous coding sequence of the GAPDH gene of the iPSC to remove a target site of a nuclease, e.g., a Cas. In some embodiments, the nuclease is a Cas (e.g., Cas9 or Cas12a), the exogenous coding sequence or partial coding sequence encoding GAPDH includes at least one PAM site for the Cas, and the at least one PAM site (or all PAM sites) has been codon optimized or saturated with silent and/or missense mutations.

[0228] In some embodiments, the iPSC's genome comprises a regulatory element that enables expression of the gene product encoded by the GAPDH gene and the gene product of interest as separate gene products, optionally, wherein at least one of the gene products is a protein and the regulatory element enables expression of that protein separate from the other gene product. In some embodiments, the iPSC's genome comprises an IRES or 2A element located between the coding sequence of the GAPDH gene and the exogenous coding sequence for the gene product of interest.

[0229] In some embodiments, the iPSC's genome comprises a polyadenylation sequence, and optionally a 3′ UTR sequence, downstream of the exogenous coding sequence for the gene product of interest, and, if a 3′UTR sequence is present, the 3′UTR sequence is positioned 3′ of the exogenous coding sequence and 5′ of the polyadenylation sequence.

[0230] In some embodiments, the iPSC's genome does not comprise a reporter gene, e.g., a fluorescent reporter gene or an antibiotic resistance gene.

[0231] In some embodiments, the knock-in cassette is a multi-cistronic (e.g., bi-cistronic) knock-in cassette comprising exogenous coding sequences for two or more gene products of interest. In some embodiments, the knock-in cassette comprises a first exogenous coding sequence for a first gene product of interest, a linker (e.g., T2A, P2A, and/or IRES), and a second exogenous coding sequence for a second gene product of interest. In some embodiments, the genome-edited iPSC comprises knock-in cassettes at one or both alleles of the GAPDH gene. In some embodiments, the genome-edited iPSC expresses (a) the first and second gene products of interest, and (b) GAPDH, or a functional variant thereof.

[0232] In some embodiments, the engineered iPSC comprises a first knock-in cassette comprising a first exogenous coding sequence for a first gene product of interest in frame with and downstream (3′) of an exogenous coding sequence or partial coding sequence of the GAPDH gene, and with a second donor template that comprises a second knock-in cassette comprising a second exogenous coding sequence for a second gene product of interest in frame with and downstream (3′) of an exogenous coding sequence or partial coding sequence of the GAPDH gene. In some embodiments, the engineered iPSC comprises the first knock-in cassette at a first allele of the GAPDH gene and the second knock-in cassette at the second allele of the GAPDH gene. In some embodiments, the engineered iPSC expresses (a) the first and second gene products of interest, and (b) GAPDH, or a functional variant thereof.

[0233] In some embodiments, the engineered iPSC comprises multi-cistronic knock-ins (e.g., at one or both alleles of GAPDH gene) of two or more gene products of interest, e.g., one or more of the following gene products of interest, in order: CD16+IL15; IL15+CD16; CD16+CAR; CAR+CD16; IL15+CAR; CAR+IL15; CD16+(HLA-E or HLA-G or CD47); (HLA-E or HLA-G or CD47)+CD16; IL15+(HLA-E or HLA-G or CD47); (HLA-E or HLA-G or CD47)+IL15; CAR+(HLA-E or HLA-G or CD47); (HLA-E or HLA-G or CD47)+CAR. In some embodiments, the engineered iPSC comprises bi-allelic knock-ins (e.g., a first gene product of interest at a first allele of GAPDH gene, and a second gene product of interest at a second allele of GAPDH gene) of the following pairs of gene products of interest: CD16+IL15; IL15+CD16; CD16+CAR; CAR+CD16; IL15+CAR; CAR+IL15; CD16+(HLA-E or HLA-G or CD47); (HLA-E or HLA-G or CD47)+CD16; IL15+(HLA-E or HLA-G or CD47); (HLA-E or HLA-G or CD47)+IL15; CAR+(HLA-E or HLA-G or CD47); (HLA-E or HLA-G or CD47)+CAR.

[0234] In some embodiments, engineered iPSC comprises the first knock-in cassette at one or both alleles of the GAPDH gene and the second knock-in cassette at one or both alleles of a second essential gene. In some embodiments, the genome-edited iPSC expresses (a) the first and second gene products of interest, (b) GAPDH, and (c) the gene product encoded by the second essential gene required for survival and/or proliferation of the iPSC, or a functional variant thereof. In some embodiments, the second essential gene is a gene listed in Table 3 or 4. In some embodiments, the second essential gene is TBP.

[0235] In another aspect, the disclosure features an immune cell (e.g., an iNK cell or T cell) differentiated from an iPSC described herein.

[0236] In another aspect, the disclosure features any of the iPSCs (or iNK or T cell differentiated from an iPSC) described herein for use as a medicament and/or for use in the treatment of a disease, disorder or condition, e.g., a disease, disorder or condition described herein, e.g., a cancer, e.g., a cancer described herein.

[0237] In another aspect, the disclosure features an iPSC, or a population of iPSCs, produced by any of the methods described herein, or progeny thereof.

[0238] In another aspect, the disclosure features a system for editing the genome of an iPSC (or an iPSC in a population of iPSCs), the system comprising the iPSC (or the population of iPSC), a nuclease that causes a break within an endogenous coding sequence of a GAPDH gene of the iPSC, and a donor template that comprises a knock-in cassette comprising an exogenous coding sequence for a gene product of interest in frame with and downstream (3′) of an exogenous coding sequence or partial coding sequence of the GAPDH gene, and wherein the gene product of interest is a chimeric antigen receptor (CAR), a non-naturally occurring variant of FcγRIII (CD16), interleukin 15 (IL-15), interleukin 15 receptor (IL-15R) or a variant thereof, interleukin 12 (IL-12), interleukin-12 receptor (IL-12R) or a variant thereof, human leukocyte antigen G (HLA-G), human leukocyte antigen E (HLA-E), leukocyte surface antigen cluster of differentiation CD47 (CD47), or any combination of two or more thereof.

[0239] In some embodiments, after contacting the population of iPSCs with the nuclease and the donor template, at least about 60%, at least about 65%, at least about 70%, at least about 75%, at least about 80%, at least about 85%, at least about 90%, at least about 95%, or more, of the viable iPSCs of the population of iPSCs are genome-edited iPSCs, and/or about 40% or less, about 35% or less, about 30% or less, about 25% or less, about 20% or less, about 15% or less, about 10% or less, or about 5% or less, of the population of iPSCs lacking an integrated knock-in cassette are viable iPSCs. In some embodiments, after contacting the population of iPSCs with the nuclease and the donor template, at least about 80% of the viable iPSCs of the population of iPSCs are genome-edited iPSCs, and about 20% or less of the population of iPSCs lacking an integrated knock-in cassette are viable iPSCs. In some embodiments, after contacting the population of iPSCs with the nuclease and the donor template, at least about 60% of the viable iPSCs of the population of iPSCs are genome-edited iPSCs, and about 40% or less of the population of iPSCs lacking an integrated knock-in cassette are viable iPSCs. In some embodiments, after contacting the population of iPSCs with the nuclease and the donor template, at least about 90% of the viable iPSCs of the population of iPSCs are genome-edited iPSCs, and about 10% or less of the population of iPSCs lacking an integrated knock-in cassette are viable iPSCs. In some embodiments, after contacting the population of iPSCs with the nuclease and the donor template, at least about 95% of the viable iPSCs of the population of iPSCs are genome-edited iPSCs, and about 5% or less of the population of iPSCs lacking an integrated knock-in cassette are viable iPSCs.

[0240] In some embodiments, after contacting the iPSC or population of iPSCs with the nuclease and the donor template, if the knock-in cassette is not integrated into the genome of the iPSC by homology-directed repair (HDR) in the correct position or orientation, the iPSC no longer expresses GAPDH or a functional variant thereof.

[0241] In some embodiments, the break is a double-strand break.

[0242] In some embodiments, the break is located within the last 2000, 1500, 1000, 750, 500, 400, 300, 200, 100, or 50 base pairs of the endogenous coding sequence of the GAPDH gene. In some embodiments, the break is located within the last 200 base pairs of the endogenous coding sequence of the GAPDH gene. In some embodiments, the break is located within the last exon of the GAPDH gene.

[0243] In some embodiments, the nuclease is highly efficient, e.g., capable of editing at least about 60%, at least about 65%, at least about 75%, at least about 80%, at least about 85%, at least about 90%, at least about 95%, or more, of iPSCs contacted with the nuclease. In some embodiments, the nuclease is a zinc finger nuclease (ZFN), a transcription activator-like effector nuclease (TALEN) or a meganuclease. In some embodiments, the nuclease is a CRISPR/Cas nuclease and the method further comprises contacting the iPSC (or the population of iPSCs) with a guide molecule for the CRISPR/Cas nuclease. In some embodiments, the nuclease is a Cas9 or a Cas12a nuclease, or a variant thereof (e.g., a nuclease comprising the amino acid sequence of any one of SEQ ID NOs: 58-66). In some embodiments, the guide molecule comprises a targeting domain sequence that is complementary to a portion of the endogenous coding sequence of the GAPDH gene. In some embodiments, the guide molecule comprises a targeting domain sequence that differs by no more than 3 nucleotides from a sequence that is complementary to a portion of the endogenous coding sequence of the GAPDH gene. In some embodiments, the guide molecule specifically binds to the portion of the endogenous coding sequence of the GAPDH gene. In some embodiments, the guide molecule does not bind to an endogenous coding sequence of another gene, e.g., a different essential gene. In some embodiments, the guide comprises a nucleotide sequence of any one of SEQ ID NOs 94-157 and 225-1885.

[0244] In some embodiments, the donor template is a donor DNA template, optionally wherein the donor DNA template is double-stranded. In some embodiments, the donor DNA template is a plasmid, optionally wherein the plasmid has not been linearized.

[0245] In some embodiments, the donor template comprises homology arms on either side of the knock-in cassette. In some embodiments, the donor template comprises a 5′ homology arm comprising a sequence homologous to a sequence located 5′ of the break in the genome of the iPSC. In some embodiments, the donor template comprises a 3′ homology arm comprising a sequence homologous to a sequence located 3′ of the break in the genome of the iPSC. In some embodiments, the donor template comprises a 5′ homology arm comprising a sequence homologous to a sequence located 5′ of the break in the genome of the iPSC, and the donor template comprises a 3′ homology arm comprising a sequence homologous to a sequence located 3′ of the break in the genome of the iPSC.

[0246] In some embodiments, the knock-in cassette comprises a regulatory element that enables expression of GAPDH and the gene product of interest as separate gene products, optionally, wherein at least one of the gene products is a protein and the regulatory element enables expression of that protein separate from the other gene product. In some embodiments, the knock-in cassette comprises an IRES or 2A element located between the exogenous coding sequence or partial coding sequence of the GAPDH gene and the exogenous coding sequence for the gene product of interest. In some embodiments, the 2A element is a T2A element (e.g., EGRGSLLTCGDVEENPGP), a P2A element (e.g., ATNFSLLKQAGDVEENPGP), a E2A element (e.g., QCTNYALLKLAGDVESNPGP), or an F2A element (e.g., VKQTLNFDLLKLAGDVESNPGP). In some embodiments, the knock-in cassette further comprises a sequence encoding a linker peptide upstream of the 2A element. In some embodiments, the linker peptide comprises the amino acid sequence GSG.

[0247] In some embodiments, the knock-in cassette comprises a polyadenylation sequence, and optionally a 3′ UTR sequence, downstream of the exogenous coding sequence for the gene product of interest, and, if a 3′UTR sequence is present, the 3′UTR sequence is positioned 3′ of the exogenous coding sequence and 5′ of the polyadenylation sequence.

[0248] In some embodiments, the exogenous partial coding sequence of the GAPDH gene in the knock-in cassette encodes a C-terminal fragment of GAPDH. In some embodiments, the C-terminal fragment is less than about 500, 250, 150, 125, 100, 75, 50, 25, 20, 15 or 10 amino acids in length. In some embodiments, the C-terminal fragment is less than about 25 amino acids in length. In some embodiments, the C-terminal fragment includes an amino acid sequence that is encoded by a region of the endogenous coding sequence of the GAPDH gene that spans the break.

[0249] In some embodiments, the exogenous coding sequence or partial coding sequence of the GAPDH gene in the knock-in cassette is less than 100% identical to the corresponding endogenous coding sequence of the GAPDH gene of the iPSC. In some embodiments, the exogenous coding sequence or partial coding sequence of the GAPDH gene in the knock-in cassette has been codon optimized relative to the corresponding endogenous coding sequence of the GAPDH gene of the iPSC to remove a target site of the nuclease, to reduce the likelihood of homologous recombination after integration of the knock-in cassette into the genome of the iPSC, or to increase expression of GAPDH and/or the gene product of interest after integration of the knock-in cassette into the genome of the iPSC.

[0250] In some embodiments, the nuclease is a Cas (e.g., Cas9 or Cas12a), the exogenous coding sequence or partial coding sequence of the GAPDH gene in the knock-in cassette includes at least one PAM site for the Cas, and the at least one PAM site (or all PAM sites) has been codon optimized or saturated with silent and/or missense mutations.

[0251] In some embodiments, the donor template does not comprise a reporter gene, e.g., a fluorescent reporter gene or an antibiotic resistance gene.

[0252] In some embodiments, the knock-in cassette is a multi-cistronic (e.g., bi-cistronic) knock-in cassette comprising exogenous coding sequences for two or more gene products of interest. In some embodiments, the knock-in cassette comprises a first exogenous coding sequence for a first gene product of interest, a linker (e.g., T2A, P2A, and/or IRES), and a second exogenous coding sequence for a second gene product of interest. In some embodiments, after contacting the population of iPSCs with the nuclease and the donor template, the genome-edited iPSC comprises knock-in cassettes at one or both alleles of the GAPDH gene. In some embodiments, the genome-edited iPSC expresses (a) the first and second gene products of interest, and (b) GAPDH, or a functional variant thereof.

[0253] In some embodiments, the system comprises a first a donor template that comprises a first knock-in cassette comprising a first exogenous coding sequence for a first gene product of interest in frame with and downstream (3′) of an exogenous coding sequence or partial coding sequence of the GAPDH gene, and with a second donor template that comprises a second knock-in cassette comprising a second exogenous coding sequence for a second gene product of interest in frame with and downstream (3′) of an exogenous coding sequence or partial coding sequence of the GAPDH gene. In some embodiments, after contacting the population of iPSCs with the nuclease and the donor templates, the genome-edited iPSC comprises the first knock-in cassette at a first allele of the GAPDH gene and the second knock-in cassette at the second allele of the GAPDH gene. In some embodiments, the genome-edited iPSC expresses (a) the first and second gene products of interest, and (b) GAPDH, or a functional variant thereof.

[0254] In some embodiments, after contacting the population of iPSCs with the nuclease and the donor template or templates, the iPSCs comprise multi-cistronic knock-ins (e.g., at one or both alleles of GAPDH gene) of two or more gene products of interest, e.g., one or more of the following gene products of interest, in order: CD16+IL15; IL15+CD16; CD16+CAR; CAR+CD16; IL15+CAR; CAR+IL15; CD16+(HLA-E or HLA-G or CD47); (HLA-E or HLA-G or CD47)+CD16; IL15+(HLA-E or HLA-G or CD47); (HLA-E or HLA-G or CD47)+IL15; CAR+(HLA-E or HLA-G or CD47); (HLA-E or HLA-G or CD47)+CAR. In some embodiments, the iPSCs comprise bi-allelic knock-ins (e.g., a first gene product of interest at a first allele of GAPDH gene, and a second gene product of interest at a second allele of GAPDH gene) of the following pairs of gene products of interest: CD16+IL15; IL15+CD16; CD16+CAR; CAR+CD16; IL15+CAR; CAR+IL15; CD16+(HLA-E or HLA-G or CD47); (HLA-E or HLA-G or CD47)+CD16; IL15+(HLA-E or HLA-G or CD47); (HLA-E or HLA-G or CD47)+IL15; CAR+(HLA-E or HLA-G or CD47); (HLA-E or HLA-G or CD47)+CAR.

[0255] In some embodiments, the iPSCs comprise the first knock-in cassette at one or both alleles of the GAPDH gene and the second knock-in cassette at one or both alleles of a second essential gene. In some embodiments, the IPSCs express (a) the first and second gene products of interest, (b) GAPDH, and (c) the gene product encoded by the second essential gene required for survival and/or proliferation of the iPSC, or a functional variant thereof. In some embodiments, the second essential gene is a gene listed in Table 3 or 4. In some embodiments, the second essential gene is TBP.

[0256] In another aspect, the disclosure features a donor template comprising a knock-in cassette with an exogenous coding sequence for a gene product of interest in frame with and downstream (3′) of an exogenous coding sequence or partial coding sequence of a GAPDH gene, wherein the gene product of interest is a chimeric antigen receptor (CAR), a non-naturally occurring variant of FcγRIII (CD16), interleukin 15 (IL-15), interleukin 15 receptor (IL-15R) or a variant thereof, interleukin 12 (IL-12), interleukin-12 receptor (IL-12R) or a variant thereof, human leukocyte antigen G (HLA-G), human leukocyte antigen E (HLA-E), leukocyte surface antigen cluster of differentiation CD47 (CD47), or any combination of two or more thereof.

[0257] In some embodiments, the donor template is for use in editing the genome of an iPSC by homology-directed repair (HDR).

[0258] In some embodiments, the donor template is a donor DNA template, optionally wherein the donor DNA template is double-stranded. In some embodiments, the donor DNA template is a plasmid, optionally wherein the plasmid has not been linearized.

[0259] In some embodiments, the donor template comprises homology arms on either side of the knock-in cassette. In some embodiments, the donor template comprises a 5′ homology arm comprising a sequence homologous to a sequence located 5′ of a target site in the genome of the iPSC. In some embodiments, the donor template comprises a 3′ homology arm comprising a sequence homologous to a sequence located 3′ of a target site in the genome of the iPSC. In some embodiments, the donor template comprises a 5′ homology arm comprising a sequence homologous to a sequence located 5′ of a target site in the genome of the iPSC, and the donor template comprises a 3′ homology arm comprising a sequence homologous to a sequence located 3′ of a target site in the genome of the iPSC.

[0260] In some embodiments, the knock-in cassette comprises a regulatory element that enables expression of GAPDH and the gene product of interest as separate gene products, optionally, wherein at least one of the gene products is a protein and the regulatory element enables expression of that protein separate from the other gene product. In some embodiments, the knock-in cassette comprises an IRES or 2A element located between the exogenous coding sequence or partial coding sequence of the GAPDH gene and the exogenous coding sequence for the gene product of interest. In some embodiments, the 2A element is a T2A element (e.g., EGRGSLLTCGDVEENPGP), a P2A element (e.g., ATNFSLLKQAGDVEENPGP), a E2A element (e.g., QCTNYALLKLAGDVESNPGP), or an F2A element (e.g., VKQTLNFDLLKLAGDVESNPGP). In some embodiments, the knock-in cassette further comprises a sequence encoding a linker peptide upstream of the 2A element. In some embodiments, the linker peptide comprises the amino acid sequence GSG.

[0261] In some embodiments, the knock-in cassette comprises a polyadenylation sequence, and optionally a 3′ UTR sequence, downstream of the exogenous coding sequence for the gene product of interest, and, if a 3′UTR sequence is present, the 3′UTR sequence is positioned 3′ of the exogenous coding sequence and 5′ of the polyadenylation sequence.

[0262] In some embodiments, the exogenous partial coding sequence of the GAPDH gene in the knock-in cassette encodes a C-terminal fragment of GAPDH. In some embodiments, the C-terminal fragment is less than about 500, 250, 150, 125, 100, 75, 50, 25, 20, 15 or 10 amino acids in length. In some embodiments, the C-terminal fragment is less than about 25 10 amino acids in length. In some embodiments, the C-terminal fragment includes an amino acid sequence that is encoded by a region of the endogenous coding sequence of the GAPDH gene.

[0263] In some embodiments, the exogenous coding sequence or partial coding sequence of the GAPDH gene in the knock-in cassette is less than 100% identical to the corresponding endogenous coding sequence of the GAPDH gene of the iPSC. In some embodiments, the exogenous coding sequence or partial coding sequence of the GAPDH gene in the knock-in cassette has been codon optimized relative to the corresponding endogenous coding sequence of the GAPDH gene of the iPSC to remove a target site of the nuclease, to reduce the likelihood of homologous recombination after integration of the knock-in cassette into the genome of the iPSC, or to increase expression of GAPDH and/or the gene product of interest after integration of the knock-in cassette into the genome of the iPSC.

[0264] In some embodiments, the nuclease is a Cas (e.g., Cas9 or Cas12a), the exogenous coding sequence or partial coding sequence of the GAPDH gene in the knock-in cassette includes at least one PAM site for the Cas, and the at least one PAM site (or all PAM sites) has been codon optimized or saturated with silent and/or missense mutations.

[0265] In some embodiments, the donor template does not comprise a reporter gene, e.g., a fluorescent reporter gene or an antibiotic resistance gene.

[0266] In another aspect, the disclosure features a method of producing a population of modified iPSCs, the method comprising contacting iPSCs with: (i) a nuclease that causes a break within an endogenous coding sequence of a GAPDH gene in a plurality of the iPSCs, and (ii) a donor template that comprises a knock-in cassette comprising an exogenous coding sequence for a gene product of interest in frame with and downstream (3′) of an exogenous coding sequence or partial coding sequence of the GAPDH gene, wherein the knock-in cassette is integrated into the genome of a plurality of the iPSCs by homology-directed repair (HDR) of the break, resulting in genome-edited iPSCs that expresses: (a) the gene product of interest, and (b) GAPDH, or a functional variant thereof, wherein the gene product of interest is a chimeric antigen receptor (CAR), a non-naturally occurring variant of FcγRIII (CD16), interleukin 15 (IL-15), interleukin 15 receptor (IL-15R) or a variant thereof, interleukin 12 (IL-12), interleukin-12 receptor (IL-12R) or a variant thereof, human leukocyte antigen G (HLA-G), human leukocyte antigen E (HLA-E), leukocyte surface antigen cluster of differentiation CD47 (CD47), or any combination of two or more thereof, and wherein following the contacting step, at least about 60%, at least about 65%, at least about 70%, at least about 75%, at least about 80%, at least about 85%, at least about 90%, at least about 95%, or more, of the viable iPSCs are genome-edited iPSCs, and/or about 40% or less, about 35% or less, about 30% or less, about 25% or less, about 20% or less, about 15% or less, about 10% or less, or about 5% or less, of the iPSCs lacking an integrated knock-in cassette are viable iPSCs, thereby producing a population of modified iPSCs. In some embodiments, following the contacting step, at least about 80% of the viable iPSCs are genome-edited iPSCs, and about 20% or less of the iPSCs lacking an integrated knock-in cassette are viable iPSCs. In some embodiments, following the contacting step, at least about 60% of the viable iPSCs are genome-edited iPSCs, and about 40% or less of the iPSCs lacking an integrated knock-in cassette are viable iPSCs. In some embodiments, following the contacting step, at least about 90% of the viable iPSCs are genome-edited iPSCs, and about 10% or less of the iPSCs lacking an integrated knock-in cassette are viable iPSCs. In some embodiments, following the contacting step, at least about 95% of the viable iPSCs are genome-edited iPSCs, and about 5% or less of iPSCs lacking an integrated knock-in cassette are viable iPSCs.

[0267] In some embodiments, if the knock-in cassette is not integrated into the genome of the iPSC by homology-directed repair (HDR) in the correct position or orientation, the iPSC no longer expresses GAPDH, or a functional variant thereof.

[0268] In some embodiments, the break is a double-strand break.

[0269] In some embodiments, the break is located within the last 2000, 1500, 1000, 750, 500, 400, 300, 200, 100, or 50 base pairs of the endogenous coding sequence of the GAPDH gene. In some embodiments, the break is located within the last 200 base pairs of the endogenous coding sequence of the GAPDH gene. In some embodiments, the break is located within the last exon of the GAPDH gene.

[0270] In some embodiments, the nuclease is highly efficient, e.g., capable of editing at least about 60%, at least about 65%, at least about 75%, at least about 80%, at least about 85%, at least about 90%, at least about 95%, or more, of iPSCs contacted with the nuclease. In some embodiments, the nuclease is a zinc finger nuclease (ZFN), a transcription activator-like effector nuclease (TALEN) or a meganuclease. In some embodiments, the nuclease is a CRISPR/Cas nuclease and the method further comprises contacting the iPSC (or the population of iPSCs) with a guide molecule for the CRISPR/Cas nuclease. In some embodiments, the nuclease is a Cas9 or a Cas12a nuclease, or a variant thereof (e.g., a nuclease comprising the amino acid sequence of any one of SEQ ID NOs: 58-66). In some embodiments, the guide molecule comprises a targeting domain sequence that is complementary to a portion of the endogenous coding sequence of the GAPDH gene. In some embodiments, the guide molecule comprises a targeting domain sequence that differs by no more than 3 nucleotides from a sequence that is complementary to a portion of the endogenous coding sequence of the GAPDH gene. In some embodiments, the guide molecule specifically binds to the portion of the endogenous coding sequence of the GAPDH gene. In some embodiments, the guide molecule does not bind to an endogenous coding sequence of another gene, e.g., a different essential gene. In some embodiments, the guide comprises a nucleotide sequence of any one of SEQ ID NOs: 94-157 and 225-1885.

[0271] In some embodiments, the donor template is a donor DNA template, optionally wherein the donor DNA template is double-stranded. In some embodiments, the donor DNA template is a plasmid, optionally wherein the plasmid has not been linearized.

[0272] In some embodiments, the donor template comprises homology arms on either side of the knock-in cassette. In some embodiments, the donor template comprises a 5′ homology arm comprising a sequence homologous to a sequence located 5′ of the break in the genome of the iPSC. In some embodiments, the donor template comprises a 3′ homology arm comprising a sequence homologous to a sequence located 3′ of the break in the genome of the iPSC. In some embodiments, the donor template comprises a 5′ homology arm comprising a sequence homologous to a sequence located 5′ of the break in the genome of the iPSC, and the donor template comprises a 3′ homology arm comprising a sequence homologous to a sequence located 3′ of the break in the genome of the iPSC.

[0273] In some embodiments, the knock-in cassette comprises a regulatory element that enables expression of GAPDH and the gene product of interest as separate gene products, optionally, wherein at least one of the gene products is a protein and the regulatory element enables expression of that protein separate from the other gene product. In some embodiments, the knock-in cassette comprises an IRES or 2A element located between the exogenous coding sequence or partial coding sequence of the GAPDH gene and the exogenous coding sequence for the gene product of interest. In some embodiments, the 2A element is a T2A element (e.g., EGRGSLLTCGDVEENPGP), a P2A element (e.g., ATNFSLLKQAGDVEENPGP), a E2A element (e.g., QCTNYALLKLAGDVESNPGP), or an F2A element (e.g., VKQTLNFDLLKLAGDVESNPGP). In some embodiments, the knock-in cassette further comprises a sequence encoding a linker peptide upstream of the 2A element. In some embodiments, the linker peptide comprises the amino acid sequence GSG.

[0274] In some embodiments, the knock-in cassette comprises a polyadenylation sequence, and optionally a 3′ UTR sequence, downstream of the exogenous coding sequence for the gene product of interest, and, if a 3′UTR sequence is present, the 3′UTR sequence is positioned 3′ of the exogenous coding sequence and 5′ of the polyadenylation sequence.

[0275] In some embodiments, the exogenous partial coding sequence of the GAPDH gene in the knock-in cassette encodes a C-terminal fragment of GAPDH. In some embodiments, the C-terminal fragment is less than about 500, 250, 150, 125, 100, 75, 50, 25, 20, 15 or 10 amino acids in length. In some embodiments, the C-terminal fragment is less than about 25 amino acids in length. In some embodiments, the C-terminal fragment includes an amino acid sequence that is encoded by a region of the endogenous coding sequence of the GAPDH gene that spans the break.

[0276] In some embodiments, the exogenous coding sequence or partial coding sequence of the GAPDH gene in the knock-in cassette is less than 100% identical to the corresponding endogenous coding sequence of the GAPDH gene of the iPSC. In some embodiments, the exogenous coding sequence or partial coding sequence of the GAPDH gene in the knock-in cassette has been codon optimized relative to the corresponding endogenous coding sequence of the GAPDH gene of the iPSC to remove a target site of the nuclease, to reduce the likelihood of homologous recombination after integration of the knock-in cassette into the genome of the iPSC, or to increase expression of GAPDH and/or the gene product of interest after integration of the knock-in cassette into the genome of the iPSC.

[0277] In some embodiments, the nuclease is a Cas (e.g., Cas9 or Cas12a), the exogenous coding sequence or partial coding sequence of the GAPDH gene in the knock-in cassette includes at least one PAM site for the Cas, and the at least one PAM site (or all PAM sites) has been codon optimized or saturated with silent and/or missense mutations.

[0278] In some embodiments, the donor template does not comprise a reporter gene, e.g., a fluorescent reporter gene or an antibiotic resistance gene.

[0279] In some embodiments, the knock-in cassette is a multi-cistronic (e.g., bi-cistronic) knock-in cassette comprising exogenous coding sequences for two or more gene products of interest. In some embodiments, the knock-in cassette comprises a first exogenous coding sequence for a first gene product of interest, a linker (e.g., T2A, P2A, and/or IRES), and a second exogenous coding sequence for a second gene product of interest. In some embodiments, the genome-edited iPSCs comprise knock-in cassettes at one or both alleles of the GAPDH gene. In some embodiments, the genome-edited iPSCs express (a) the first and second gene products of interest, and (b) GAPDH, or a functional variant thereof.

[0280] In some embodiments, the method comprises contacting iPSCs (or the population of iPSCs) with a first a donor template that comprises a first knock-in cassette comprising a first exogenous coding sequence for a first gene product of interest in frame with and downstream (3′) of an exogenous coding sequence or partial coding sequence of the GAPDH gene, and with a second donor template that comprises a second knock-in cassette comprising a second exogenous coding sequence for a second gene product of interest in frame with and downstream (3′) of an exogenous coding sequence or partial coding sequence of the GAPDH gene. In some embodiments, the genome-edited iPSCs comprise the first knock-in cassette at a first allele of the GAPDH gene and the second knock-in cassette at the second allele of the GAPDH gene. In some embodiments, the genome-edited iPSCs express (a) the first and second gene products of interest, and (b) GAPDH, or a functional variant thereof.

[0281] In some embodiments, the genome-edited iPSCs comprise multi-cistronic knock-ins (e.g., at one or both alleles of GAPDH gene) of two or more gene products of interest, e.g., one or more of the following gene products of interest, in order: CD16+IL15; IL15+CD16; CD16+CAR; CAR+CD16; IL15+CAR; CAR+IL15; CD16+(HLA-E or HLA-G or CD47); (HLA-E or HLA-G or CD47)+CD16; IL15+(HLA-E or HLA-G or CD47); (HLA-E or HLA-G or CD47)+IL15; CAR+(HLA-E or HLA-G or CD47); (HLA-E or HLA-G or CD47)+CAR. In some embodiments, the genome-edited iPSCs comprise bi-allelic knock-ins (e.g., a first gene product of interest at a first allele of GAPDH gene, and a second gene product of interest at a second allele of GAPDH gene) of the following pairs of gene products of interest: CD16+IL15; IL15+CD16; CD16+CAR; CAR+CD16; IL15+CAR; CAR+IL15; CD16+(HLA-E or HLA-G or CD47); (HLA-E or HLA-G or CD47)+CD16; IL15+(HLA-E or HLA-G or CD47); (HLA-E or HLA-G or CD47)+IL15; CAR+(HLA-E or HLA-G or CD47); (HLA-E or HLA-G or CD47)+CAR.

[0282] In some embodiments, the method comprises contacting iPSCs (or the population of iPSCs) with a first a donor template that comprises a first knock-in cassette comprising a first exogenous coding sequence for a first gene product of interest in frame with and downstream (3′) of an exogenous coding sequence or partial coding sequence of a GAPDH gene, and with a second donor template that comprises a second knock-in cassette comprising a second exogenous coding sequence for a second gene product of interest in frame with and downstream (3′) of an exogenous coding sequence or partial coding sequence of a second essential gene. In some embodiments, the genome-edited iPSC comprises the first knock-in cassette at one or both alleles of the GAPDH gene and the second knock-in cassette at one or both alleles of the second essential gene. In some embodiments, the genome-edited iPSC expresses (a) the first and second gene products of interest, (b) GAPDH, and (c) the gene product encoded by the second essential gene required for survival and/or proliferation of the iPSC, or a functional variant thereof. In some embodiments, the second essential gene is a gene listed in Table 3 or 4. In some embodiments, the second essential gene is TBP.

[0283] In another aspect, the disclosure features a method of selecting and/or identifying an iPSC comprising a knock-in of a gene product of interest within an endogenous coding sequence of a GAPDH gene in the iPSC, the method comprising contacting a population of iPSCs with: (i) a nuclease that causes a break within an endogenous coding sequence of a GAPDH gene in a plurality of the iPSCs, and (ii) a donor template that comprises a knock-in cassette comprising an exogenous coding sequence for a gene product of interest in frame with and downstream (3′) of an exogenous coding sequence or partial coding sequence of the GAPDH gene, wherein the knock-in cassette is integrated into the genome of a plurality of the iPSCs by homology-directed repair (HDR) of the break, and identifying a genome-edited iPSC within the population of iPSCs that expresses: (a) the gene product of interest, and (b) GAPDH, or a functional variant thereof, wherein the gene product of interest is a chimeric antigen receptor (CAR), a non-naturally occurring variant of FcγRIII (CD16), interleukin 15 (IL-15), interleukin 15 receptor (IL-15R) or a variant thereof, interleukin 12 (IL-12), interleukin-12 receptor (IL-12R) or a variant thereof, human leukocyte antigen G (HLA-G), human leukocyte antigen E (HLA-E), leukocyte surface antigen cluster of differentiation CD47 (CD47), or any combination of two or more thereof.

[0284] In some embodiments, following the contacting step, at least about 60%, at least about 65%, at least about 70%, at least about 75%, at least about 80%, at least about 85%, at least about 90%, at least about 95%, or more, of the viable iPSCs of the population of iPSCs are genome-edited iPSCs, and/or about 40% or less, about 35% or less, about 30% or less, about 25% or less, about 20% or less, about 15% or less, about 10% or less, or about 5% or less, of the population of iPSCs lacking an integrated knock-in cassette are iPSCs. In some embodiments, following the contacting step, at least about 80% of the viable iPSCs of the population of iPSCs are genome-edited iPSCs, and about 20% or less of the population of iPSCs lacking an integrated knock-in cassette are viable iPSCs. In some embodiments, following the contacting step, at least about 60% of the viable iPSCs of the population of iPSCs are genome-edited iPSCs, and about 40% or less of the population of iPSCs lacking an integrated knock-in cassette are viable iPSCs. In some embodiments, following the contacting step, at least about 90% of the viable iPSCs of the population of iPSCs are genome-edited iPSCs, and about 10% or less of the population of iPSCs lacking an integrated knock-in cassette are viable iPSCs. In some embodiments, following the contacting step, at least about 95% of the viable iPSCs of the population of iPSCs are genome-edited iPSCs, and about 5% or less of the population of iPSCs lacking an integrated knock-in cassette are viable iPSCs.

[0285] In some embodiments, if the knock-in cassette is not integrated into the genome of the iPSC by homology-directed repair (HDR) in the correct position or orientation, the iPSC no longer expresses GAPDH, or a functional variant thereof.

[0286] In some embodiments, the break is a double-strand break.

[0287] In some embodiments, the break is located within the last 2000, 1500, 1000, 750, 500, 400, 300, 200, 100, or 50 base pairs of the endogenous coding sequence of the GAPDH gene. In some embodiments, the break is located within the last 200 base pairs of the endogenous coding sequence of the GAPDH gene. In some embodiments, the break is located within the last exon of the GAPDH gene.

[0288] In some embodiments, the nuclease is highly efficient, e.g., capable of editing at least about 60%, at least about 65%, at least about 75%, at least about 80%, at least about 85%, at least about 90%, at least about 95%, or more, of iPSCs contacted with the nuclease. In some embodiments, the nuclease is a zinc finger nuclease (ZFN), a transcription activator-like effector nuclease (TALEN) or a meganuclease. In some embodiments, the nuclease is a CRISPR/Cas nuclease and the method further comprises contacting the iPSC (or the population of iPSCs) with a guide molecule for the CRISPR/Cas nuclease. In some embodiments, the nuclease is a Cas9 or a Cas12a nuclease, or a variant thereof (e.g., a nuclease comprising the amino acid sequence of any one of SEQ ID NOs: 58-66). In some embodiments, the guide molecule comprises a targeting domain sequence that is complementary to a portion of the endogenous coding sequence of the GAPDH gene. In some embodiments, the guide molecule comprises a targeting domain sequence that differs by no more than 3 nucleotides from a sequence that is complementary to a portion of the endogenous coding sequence of the GAPDH gene. In some embodiments, the guide molecule specifically binds to the portion of the endogenous coding sequence of the GAPDH gene. In some embodiments, the guide molecule does not bind to an endogenous coding sequence of another gene, e.g., a different essential gene. In some embodiments, the guide comprises a nucleotide sequence of any one of SEQ ID NOs: 94-157 and 225-1885.

[0289] In some embodiments, the donor template is a donor DNA template, optionally wherein the donor DNA template is double-stranded. In some embodiments, the donor DNA template is a plasmid, optionally wherein the plasmid has not been linearized.

[0290] In some embodiments, the donor template comprises homology arms on either side of the knock-in cassette. In some embodiments, the donor template comprises a 5′ homology arm comprising a sequence homologous to a sequence located 5′ of the break in the genome of the iPSC. In some embodiments, the donor template comprises a 3′ homology arm comprising a sequence homologous to a sequence located 3′ of the break in the genome of the iPSC. In some embodiments, the donor template comprises a 5′ homology arm comprising a sequence homologous to a sequence located 5′ of the break in the genome of the iPSC, and the donor template comprises a 3′ homology arm comprising a sequence homologous to a sequence located 3′ of the break in the genome of the iPSC.

[0291] In some embodiments, the knock-in cassette comprises a regulatory element that enables expression of GAPDH and the gene product of interest as separate gene products, optionally, wherein at least one of the gene products is a protein and the regulatory element enables expression of that protein separate from the other gene product. In some embodiments, the knock-in cassette comprises an IRES or 2A element located between the exogenous coding sequence or partial coding sequence of the GAPDH gene and the exogenous coding sequence for the gene product of interest. In some embodiments, the 2A element is a T2A element (e.g., EGRGSLLTCGDVEENPGP), a P2A element (e.g., ATNFSLLKQAGDVEENPGP), a E2A element (e.g., QCTNYALLKLAGDVESNPGP), or an F2A element (e.g., VKQTLNFDLLKLAGDVESNPGP). In some embodiments, the knock-in cassette further comprises a sequence encoding a linker peptide upstream of the 2A element. In some embodiments, the linker peptide comprises the amino acid sequence GSG.

[0292] In some embodiments, the knock-in cassette comprises a polyadenylation sequence, and optionally a 3′ UTR sequence, downstream of the exogenous coding sequence for the gene product of interest, and, if a 3′UTR sequence is present, the 3′UTR sequence is positioned 3′ of the exogenous coding sequence and 5′ of the polyadenylation sequence.

[0293] In some embodiments, the exogenous partial coding sequence of the GAPDH gene in the knock-in cassette encodes a C-terminal fragment of GAPDH. In some embodiments, the C-terminal fragment is less than about 500, 250, 150, 125, 100, 75, 50, 25, 20, 15 or 10 amino acids in length. In some embodiments, the C-terminal fragment is less than about 25 amino acids in length. In some embodiments, the C-terminal fragment includes an amino acid sequence that is encoded by a region of the endogenous coding sequence of the GAPDH gene that spans the break.

[0294] In some embodiments, the exogenous coding sequence or partial coding sequence of the GAPDH gene in the knock-in cassette is less than 100% identical to the corresponding endogenous coding sequence of the GAPDH gene of the iPSC. In some embodiments, the exogenous coding sequence or partial coding sequence of the GAPDH gene in the knock-in cassette has been codon optimized relative to the corresponding endogenous coding sequence of the GAPDH gene of the iPSC to remove a target site of the nuclease, to reduce the likelihood of homologous recombination after integration of the knock-in cassette into the genome of the iPSC, or to increase expression of GAPDH and/or the gene product of interest after integration of the knock-in cassette into the genome of the iPSC.

[0295] In some embodiments, the nuclease is a Cas (e.g., Cas9 or Cas12a), the exogenous coding sequence or partial coding sequence of the GAPDH gene in the knock-in cassette includes at least one PAM site for the Cas, and the at least one PAM site (or all PAM sites) has been codon optimized or saturated with silent and/or missense mutations.

[0296] In some embodiments, the donor template does not comprise a reporter gene, e.g., a fluorescent reporter gene or an antibiotic resistance gene.

[0297] In some embodiments, the knock-in cassette is a multi-cistronic (e.g., bi-cistronic) knock-in cassette comprising exogenous coding sequences for two or more gene products of interest. In some embodiments, the knock-in cassette comprises a first exogenous coding sequence for a first gene product of interest, a linker (e.g., T2A, P2A, and/or IRES), and a second exogenous coding sequence for a second gene product of interest. In some embodiments, the genome-edited iPSC comprises knock-in cassettes at one or both alleles of the GAPDH gene. In some embodiments, the genome-edited iPSC expresses (a) the first and second gene products of interest, and (b) GAPDH, or a functional variant thereof.

[0298] In some embodiments, the method comprises contacting the population of iPSCs with a first a donor template that comprises a first knock-in cassette comprising a first exogenous coding sequence for a first gene product of interest in frame with and downstream (3′) of an exogenous coding sequence or partial coding sequence of the GAPDH gene, and with a second donor template that comprises a second knock-in cassette comprising a second exogenous coding sequence for a second gene product of interest in frame with and downstream (3′) of an exogenous coding sequence or partial coding sequence of the GAPDH gene. In some embodiments, the genome-edited iPSCs comprise the first knock-in cassette at a first allele of the GAPDH gene and the second knock-in cassette at the second allele of the GAPDH gene. In some embodiments, the genome-edited iPSCs express (a) the first and second gene products of interest, and (b) GAPDH, or a functional variant thereof.

[0299] In some embodiments, the genome-edited iPSCs comprise multi-cistronic knock-ins (e.g., at one or both alleles of GAPDH gene) of two or more gene products of interest, e.g., one or more of the following gene products of interest, in order: CD16+IL15; IL15+CD16; CD16+CAR; CAR+CD16; IL15+CAR; CAR+IL15; CD16+(HLA-E or HLA-G or CD47); (HLA-E or HLA-G or CD47)+CD16; IL15+(HLA-E or HLA-G or CD47); (HLA-E or HLA-G or CD47)+IL15; CAR+(HLA-E or HLA-G or CD47); (HLA-E or HLA-G or CD47)+CAR. In some embodiments, the genome-edited iPSCs comprise bi-allelic knock-ins (e.g., a first gene product of interest at a first allele of GAPDH gene, and a second gene product of interest at a second allele of GAPDH gene) of the following pairs of gene products of interest: CD16+IL15; IL15+CD16; CD16+CAR; CAR+CD16; IL15+CAR; CAR+IL15; CD16+(HLA-E or HLA-G or CD47); (HLA-E or HLA-G or CD47)+CD16; IL15+(HLA-E or HLA-G or CD47); (HLA-E or HLA-G or CD47)+IL15; CAR+(HLA-E or HLA-G or CD47); (HLA-E or HLA-G or CD47)+CAR.

[0300] In some embodiments, the method comprises contacting iPSCs (or population of iPSCs) with a first a donor template that comprises a first knock-in cassette comprising a first exogenous coding sequence for a first gene product of interest in frame with and downstream (3′) of an exogenous coding sequence or partial coding sequence of a GAPDH gene, and with a second donor template that comprises a second knock-in cassette comprising a second exogenous coding sequence for a second gene product of interest in frame with and downstream (3′) of an exogenous coding sequence or partial coding sequence of a second essential gene. In some embodiments, the genome-edited iPSCs comprise the first knock-in cassette at one or both alleles of the GAPDH gene and the second knock-in cassette at one or both alleles of the second essential gene. In some embodiments, the genome-edited iPSCs express (a) the first and second gene products of interest, (b) GAPDH, and (c) the gene product encoded by the second essential gene required for survival and/or proliferation of the iPSCs, or a functional variant thereof. In some embodiments, the second essential gene is a gene listed in Table 3 or 4. In some embodiments, the second essential gene is TBP.

[0301] In another aspect, the disclosure features a method of editing the genome of an induced pluripotent stem cell (iPSC) (e.g., an iPSC in a population of iPSCs), the method comprising contacting the iPSC (or the population of iPSCs) with: (i) a nuclease that causes a break within an endogenous coding sequence of a glyceraldehyde 3-phosphate dehydrogenase (GAPDH) gene in the iPSC, and (ii) a donor template that comprises a knock-in cassette comprising an exogenous coding sequence for a gene product of interest in frame with and downstream (3′) of an exogenous coding sequence or partial coding sequence of the GAPDH gene, wherein the knock-in cassette is integrated into the genome of the iPSC by homology-directed repair (HDR) of the break, resulting in a genome-edited iPSC that expresses: (a) the gene product of interest, and (b) GAPDH, or a functional variant thereof, wherein the gene product of interest is PD-L1 or leukocyte surface antigen cluster of differentiation CD47 (CD47).

[0302] In some embodiments, following the contacting step, at least about 60%, at least about 65%, at least about 70%, at least about 75%, at least about 80%, at least about 85%, at least about 90%, at least about 95%, or more, of the viable iPSCs of the population of iPSCs are genome-edited iPSCs, and/or about 40% or less, about 35% or less, about 30% or less, about 25% or less, about 20% or less, about 15% or less, about 10% or less, or about 5% or less, of the population of iPSCs lacking an integrated knock-in cassette are viable iPSCs. In some embodiments, following the contacting step, at least about 80% of the viable iPSCs of the population of iPSCs are genome-edited iPSCs, and about 20% or less of the population of iPSCs lacking an integrated knock-in cassette are viable iPSCs. In some embodiments, following the contacting step, at least about 60% of the viable iPSCs of the population of iPSCs are genome-edited iPSCs, and about 40% or less of the population of iPSCs lacking an integrated knock-in cassette are viable iPSCs. In some embodiments, following the contacting step, at least about 90% of the viable iPSCs of the population of iPSCs are genome-edited iPSCs, and about 10% or less of the population of iPSCs lacking an integrated knock-in cassette are viable iPSCs. In some embodiments, following the contacting step, at least about 95% of the viable iPSCs of the population of iPSCs are genome-edited iPSCs, and about 5% or less of the population of iPSCs lacking an integrated knock-in cassette are viable iPSCs.

[0303] In some embodiments, if the knock-in cassette is not integrated into the genome of the iPSCs by homology-directed repair (HDR) in the correct position or orientation, the iPSCs no longer expresses GAPDH, or a functional variant thereof.

[0304] In some embodiments, the break is a double-strand break.

[0305] In some embodiments, the break is located within the last 2000, 1500, 1000, 750, 500, 400, 300, 200, 100, or 50 base pairs of the endogenous coding sequence of the GAPDH gene. In some embodiments, the break is located within the last 200 base pairs of the endogenous coding sequence of the GAPDH gene. In some embodiments, the break is located within the last exon of the GAPDH gene.

[0306] In some embodiments, the nuclease is highly efficient, e.g., capable of editing at least about 60%, at least about 65%, at least about 75%, at least about 80%, at least about 85%, at least about 90%, at least about 95%, or more, of iPSCs contacted with the nuclease. In some embodiments, the nuclease is a zinc finger nuclease (ZFN), a transcription activator-like effector nuclease (TALEN) or a meganuclease. In some embodiments, the nuclease is a CRISPR/Cas nuclease and the method further comprises contacting the iPSC (or the population of iPSCs) with a guide molecule for the CRISPR/Cas nuclease. In some embodiments, the nuclease is a Cas9 or a Cas12a nuclease, or a variant thereof (e.g., a nuclease comprising the amino acid sequence of any one of SEQ ID NOs: 58-66). In some embodiments, the guide molecule comprises a targeting domain sequence that is complementary to a portion of the endogenous coding sequence of the GAPDH gene. In some embodiments, the guide molecule comprises a targeting domain sequence that differs by no more than 3 nucleotides from a sequence that is complementary to a portion of the endogenous coding sequence of the GAPDH gene. In some embodiments, the guide molecule specifically binds to the portion of the endogenous coding sequence of the GAPDH gene. In some embodiments, the guide molecule does not bind to an endogenous coding sequence of another gene, e.g., a different essential gene. In some embodiments, the guide comprises a nucleotide sequence of any one of SEQ ID NOs: 94-157 and 225-1885.

[0307] In some embodiments, the donor template is a donor DNA template, optionally wherein the donor DNA template is double-stranded. In some embodiments, the donor DNA template is a plasmid, optionally wherein the plasmid has not been linearized.

[0308] In some embodiments, the donor template comprises homology arms on either side of the knock-in cassette. In some embodiments, the donor template comprises a 5′ homology arm comprising a sequence homologous to a sequence located 5′ of the break in the genome of the iPSC. In some embodiments, the donor template comprises a 3′ homology arm comprising a sequence homologous to a sequence located 3′ of the break in the genome of the iPSC. In some embodiments, the donor template comprises a 5′ homology arm comprising a sequence homologous to a sequence located 5′ of the break in the genome of the iPSC, and the donor template comprises a 3′ homology arm comprising a sequence homologous to a sequence located 3′ of the break in the genome of the iPSC.

[0309] In some embodiments, the knock-in cassette comprises a regulatory element that enables expression of GAPDH and the gene product of interest as separate gene products, optionally, wherein at least one of the gene products is a protein and the regulatory element enables expression of that protein separate from the other gene product. In some embodiments, the knock-in cassette comprises an IRES or 2A element located between the exogenous coding sequence or partial coding sequence of the GAPDH gene and the exogenous coding sequence for the gene product of interest. In some embodiments, the 2A element is a T2A element (e.g., EGRGSLLTCGDVEENPGP), a P2A element (e.g., ATNFSLLKQAGDVEENPGP), a E2A element (e.g., QCTNYALLKLAGDVESNPGP), or an F2A element (e.g., VKQTLNFDLLKLAGDVESNPGP). In some embodiments, the knock-in cassette further comprises a sequence encoding a linker peptide upstream of the 2A element. In some embodiments, the linker peptide comprises the amino acid sequence GSG.

[0310] In some embodiments, the knock-in cassette comprises a polyadenylation sequence, and optionally a 3′ UTR sequence, downstream of the exogenous coding sequence for the gene product of interest, and, if a 3′UTR sequence is present, the 3′UTR sequence is positioned 3′ of the exogenous coding sequence and 5′ of the polyadenylation sequence.

[0311] In some embodiments, the exogenous partial coding sequence of the GAPDH gene in the knock-in cassette encodes a C-terminal fragment of a protein encoded by the GAPDH gene. In some embodiments, the C-terminal fragment is less than about 500, 250, 150, 125, 100, 75, 50, 25, 20, 15 or 10 amino acids in length. In some embodiments, the C-terminal fragment is less than about 25 amino acids in length. In some embodiments, the C-terminal fragment includes an amino acid sequence that is encoded by a region of the endogenous coding sequence of the GAPDH gene that spans the break.

[0312] In some embodiments, the exogenous coding sequence or partial coding sequence of the GAPDH gene in the knock-in cassette is less than 100% identical to the corresponding endogenous coding sequence of the GAPDH gene of the iPSC. In some embodiments, the exogenous coding sequence or partial coding sequence of the GAPDH gene in the knock-in cassette has been codon optimized relative to the corresponding endogenous coding sequence of the GAPDH gene of the iPSC to remove a target site of the nuclease, to reduce the likelihood of homologous recombination after integration of the knock-in cassette into the genome of the iPSC, or to increase expression of GAPDH and/or the gene product of interest after integration of the knock-in cassette into the genome of the iPSC.

[0313] In some embodiments, the nuclease is a Cas (e.g., Cas9 or Cas12a), the exogenous coding sequence or partial coding sequence of the GAPDH gene in the knock-in cassette includes at least one PAM site for the Cas, and the at least one PAM site (or all PAM sites) has been codon optimized or saturated with silent and/or missense mutations.

[0314] In some embodiments, the donor template does not comprise a reporter gene, e.g., a fluorescent reporter gene or an antibiotic resistance gene.

[0315] In some embodiments, the knock-in cassette is a multi-cistronic (e.g., bi-cistronic) knock-in cassette comprising exogenous coding sequences for two or more gene products of interest. In some embodiments, the knock-in cassette comprises a first exogenous coding sequence for a first gene product of interest, a linker (e.g., T2A, P2A, and/or IRES), and a second exogenous coding sequence for a second gene product of interest. In some embodiments, the genome-edited iPSC comprises knock-in cassettes at one or both alleles of the GAPDH gene. In some embodiments, the genome-edited iPSC expresses (a) the first and second gene products of interest, and (b) GAPDH, or a functional variant thereof.

[0316] In some embodiments, the method comprises contacting the iPSC (or the population of iPSCs) with a first a donor template that comprises a first knock-in cassette comprising a first exogenous coding sequence for a first gene product of interest in frame with and downstream (3′) of an exogenous coding sequence or partial coding sequence of the GAPDH gene, and with a second donor template that comprises a second knock-in cassette comprising a second exogenous coding sequence for a second gene product of interest in frame with and downstream (3′) of an exogenous coding sequence or partial coding sequence of the GAPDH gene. In some embodiments, the genome-edited iPSC comprises the first knock-in cassette at a first allele of the GAPDH gene and the second knock-in cassette at the second allele of the GAPDH gene. In some embodiments, the genome-edited iPSC expresses (a) the first and second gene products of interest, and (b) GAPDH, or a functional variant thereof.

[0317] In some embodiments, the genome-edited iPSC comprises multi-cistronic knock-ins (e.g., at one or both alleles of GAPDH gene) of two or more gene products of interest, e.g., one or more of the following gene products of interest, in order: PD-L1+CD47; or CD47+PD-L1. In some embodiments, the genome-edited iPSC comprises bi-allelic knock-ins (e.g., a first gene product of interest at a first allele of GAPDH gene, and a second gene product of interest at a second allele of GAPDH gene) of the following pairs of gene products of interest: PD-L1+CD47.

[0318] In another aspect, the disclosure features a genetically modified iPSC comprising a genome with an exogenous coding sequence for a gene product of interest in frame with and downstream (3′) of a coding sequence of a GAPDH gene, wherein at least part of the coding sequence of the GAPDH gene comprises an exogenous coding sequence, and wherein the gene product of interest is PD-L1 or leukocyte surface antigen cluster of differentiation CD47 (CD47).

[0319] In some embodiments, the exogenous coding sequence of the GAPDH gene comprises about 2000, 1500, 1000, 750, 500, 400, 300, 200, 100, or 50 base pairs of the coding sequence of the GAPDH gene. In some embodiments, the exogenous coding sequence of the GAPDH gene comprises about 200 base pairs of the coding sequence of the GAPDH gene.

[0320] In some embodiments, the exogenous coding sequence of the GAPDH gene encodes a C-terminal fragment of a protein encoded by the GAPDH gene. In some embodiments, the C-terminal fragment is less than about 500, 250, 150, 125, 100, 75, 50, 25, 20, 15 or 10 amino acids in length. In some embodiments, the C-terminal fragment is less than about 25 amino acids in length. In some embodiments, the C-terminal fragment includes an amino acid sequence that is encoded by a region of the endogenous coding sequence of the GAPDH gene that spans the break.

[0321] In some embodiments, the exogenous coding sequence of the GAPDH gene is less than 100% identical to the corresponding endogenous coding sequence of the GAPDH gene of the iPSC. In some embodiments, the exogenous coding sequence of the GAPDH gene has been codon optimized relative to the corresponding endogenous coding sequence of the GAPDH gene of the iPSC to remove a target site of a nuclease, e.g., a Cas. In some embodiments, the nuclease is a Cas (e.g., Cas9 or Cas12a), the exogenous coding sequence of the GAPDH gene includes at least one PAM site for the Cas, and the at least one PAM site (or all PAM sites) has been codon optimized or saturated with silent and/or missense mutations.

[0322] In some embodiments, the iPSC's genome comprises a regulatory element that enables expression of the gene product encoded by the GAPDH gene and the gene product of interest as separate gene products, optionally, wherein at least one of the gene products is a protein and the regulatory element enables expression of that protein separate from the other gene product. In some embodiments, the iPSC's genome comprises an IRES or 2A element located between the coding sequence of the GAPDH gene and the exogenous coding sequence for the gene product of interest.

[0323] In some embodiments, the iPSC's genome comprises a polyadenylation sequence, and optionally a 3′ UTR sequence, downstream of the exogenous coding sequence for the gene product of interest, and, if a 3′UTR sequence is present, the 3′UTR sequence is positioned 3′ of the exogenous coding sequence and 5′ of the polyadenylation sequence.

[0324] In some embodiments, the iPSC's genome does not comprise a reporter gene, e.g., a fluorescent reporter gene or an antibiotic resistance gene.

[0325] In another aspect, the disclosure features an engineered iPSC comprising a genomic modification, wherein the genomic modification comprises an insertion of an exogenous knock-in cassette within an endogenous coding sequence of a GAPDH gene in the iPSC's genome, wherein the knock-in cassette comprises an exogenous coding sequence for a gene product of interest in frame with and downstream (3′) of an exogenous coding sequence or partial coding sequence encoding GAPDH, or a functional variant thereof, wherein the iPSC expresses the gene product of interest and GAPDH, or a functional variant thereof, optionally wherein the gene product of interest and GAPDH are expressed from the endogenous GAPDH promoter, and wherein the gene product of interest is PD-L1 or leukocyte surface antigen cluster of differentiation CD47 (CD47).

[0326] In some embodiments, the exogenous coding sequence or partial coding sequence encoding GAPDH comprises about 2000, 1500, 1000, 750, 500, 400, 300, 200, 100, or 50 base pairs of the coding sequence of the GAPDH gene. In some embodiments, the exogenous coding sequence or partial coding sequence encoding GAPDH comprises about 200 base pairs of the coding sequence of the GAPDH gene.

[0327] In some embodiments, the exogenous coding sequence or partial coding sequence encoding GAPDH encodes a C-terminal fragment of GAPDH. In some embodiments, the C-terminal fragment is less than about 500, 250, 150, 125, 100, 75, 50, 25, 20, 15 or 10 amino acids in length. In some embodiments, the C-terminal fragment is less than about 25 amino acids in length. In some embodiments, the C-terminal fragment includes an amino acid sequence that is encoded by a region of the endogenous coding sequence of the GAPDH gene that spans the break.

[0328] In some embodiments, the exogenous coding sequence or partial coding sequence encoding GAPDH is less than 100% identical to the corresponding endogenous coding sequence of the GAPDH gene of the iPSC. In some embodiments, the exogenous coding sequence or partial coding sequence encoding GAPDH has been codon optimized relative to the corresponding endogenous coding sequence of the GAPDH gene of the iPSC to remove a target site of a nuclease, e.g., a Cas. In some embodiments, the nuclease is a Cas (e.g., Cas9 or Cas12a), the exogenous coding sequence or partial coding sequence encoding GAPDH includes at least one PAM site for the Cas, and the at least one PAM site (or all PAM sites) has been codon optimized or saturated with silent and/or missense mutations.

[0329] In some embodiments, the iPSC's genome comprises a regulatory element that enables expression of the gene product encoded by the GAPDH gene and the gene product of interest as separate gene products, optionally, wherein at least one of the gene products is a protein and the regulatory element enables expression of that protein separate from the other gene product. In some embodiments, the iPSC's genome comprises an IRES or 2A element located between the coding sequence of the GAPDH gene and the exogenous coding sequence for the gene product of interest.

[0330] In some embodiments, the iPSC's genome comprises a polyadenylation sequence, and optionally a 3′ UTR sequence, downstream of the exogenous coding sequence for the gene product of interest, and, if a 3′UTR sequence is present, the 3′UTR sequence is positioned 3′ of the exogenous coding sequence and 5′ of the polyadenylation sequence.

[0331] In some embodiments, the iPSC's genome does not comprise a reporter gene, e.g., a fluorescent reporter gene or an antibiotic resistance gene.

[0332] In some embodiments, the knock-in cassette is a multi-cistronic (e.g., bi-cistronic) knock-in cassette comprising exogenous coding sequences for two or more gene products of interest. In some embodiments, the knock-in cassette comprises a first exogenous coding sequence for a first gene product of interest, a linker (e.g., T2A, P2A, and/or IRES), and a second exogenous coding sequence for a second gene product of interest. In some embodiments, the genome-edited iPSC comprises knock-in cassettes at one or both alleles of the GAPDH gene. In some embodiments, the genome-edited iPSC expresses (a) the first and second gene products of interest, and (b) GAPDH, or a functional variant thereof.

[0333] In some embodiments, the engineered iPSC comprises a first knock-in cassette comprising a first exogenous coding sequence for a first gene product of interest in frame with and downstream (3′) of an exogenous coding sequence or partial coding sequence of the GAPDH gene, and with a second donor template that comprises a second knock-in cassette comprising a second exogenous coding sequence for a second gene product of interest in frame with and downstream (3′) of an exogenous coding sequence or partial coding sequence of the GAPDH gene. In some embodiments, the engineered iPSC comprises the first knock-in cassette at a first allele of the GAPDH gene and the second knock-in cassette at the second allele of the GAPDH gene. In some embodiments, the engineered iPSC expresses (a) the first and second gene products of interest, and (b) GAPDH, or a functional variant thereof.

[0334] In some embodiments, the engineered iPSC comprises multi-cistronic knock-ins (e.g., at one or both alleles of GAPDH gene) of two or more gene products of interest, e.g., one or more of the following gene products of interest, in order: PD-L1+CD47; CD47+PD-L1. In some embodiments, the engineered iPSC comprises bi-allelic knock-ins (e.g., a first gene product of interest at a first allele of GAPDH gene, and a second gene product of interest at a second allele of GAPDH gene) of PD-L1+CD47.

[0335] In another aspect, the disclosure features an immune cell (e.g., an iNK cell or T cell) differentiated from an iPSC described herein.

[0336] In another aspect, the disclosure features any of the iPSCs (or iNK or T cell differentiated from an iPSC) described herein for use as a medicament and/or for use in the treatment of a disease, disorder or condition, e.g., a disease, disorder or condition described herein, e.g., a cancer, e.g., a cancer described herein.

[0337] In another aspect, the disclosure features an iPSC, or a population of iPSCs, produced by any of the methods described herein, or progeny thereof.

[0338] In another aspect, the disclosure features a system for editing the genome of an iPSC (or an iPSC in a population of iPSCs), the system comprising the iPSC (or the population of iPSC), a nuclease that causes a break within an endogenous coding sequence of a GAPDH gene of the iPSC, and a donor template that comprises a knock-in cassette comprising an exogenous coding sequence for a gene product of interest in frame with and downstream (3′) of an exogenous coding sequence or partial coding sequence of the GAPDH gene, and wherein the gene product of interest is PD-L1 or leukocyte surface antigen cluster of differentiation CD47 (CD47).

[0339] In some embodiments, after contacting the population of iPSCs with the nuclease and the donor template, at least about 60%, at least about 65%, at least about 70%, at least about 75%, at least about 80%, at least about 85%, at least about 90%, at least about 95%, or more, of the viable iPSCs of the population of iPSCs are genome-edited iPSCs, and/or about 40% or less, about 35% or less, about 30% or less, about 25% or less, about 20% or less, about 15% or less, about 10% or less, or about 5% or less, of the population of iPSCs lacking an integrated knock-in cassette are viable iPSCs. In some embodiments, after contacting the population of iPSCs with the nuclease and the donor template, at least about 80% of the viable iPSCs of the population of iPSCs are genome-edited iPSCs, and about 20% or less of the population of iPSCs lacking an integrated knock-in cassette are viable iPSCs. In some embodiments, after contacting the population of iPSCs with the nuclease and the donor template, at least about 60% of the viable iPSCs of the population of iPSCs are genome-edited iPSCs, and about 40% or less of the population of iPSCs lacking an integrated knock-in cassette are viable iPSCs. In some embodiments, after contacting the population of iPSCs with the nuclease and the donor template, at least about 90% of the viable iPSCs of the population of iPSCs are genome-edited iPSCs, and about 10% or less of the population of iPSCs lacking an integrated knock-in cassette are viable iPSCs. In some embodiments, after contacting the population of iPSCs with the nuclease and the donor template, at least about 95% of the viable iPSCs of the population of iPSCs are genome-edited iPSCs, and about 5% or less of the population of iPSCs lacking an integrated knock-in cassette are viable iPSCs.

[0340] In some embodiments, after contacting the iPSC or population of iPSCs with the nuclease and the donor template, if the knock-in cassette is not integrated into the genome of the iPSC by homology-directed repair (HDR) in the correct position or orientation, the iPSC no longer expresses GAPDH or a functional variant thereof.

[0341] In some embodiments, the break is a double-strand break.

[0342] In some embodiments, the break is located within the last 2000, 1500, 1000, 750, 500, 400, 300, 200, 100, or 50 base pairs of the endogenous coding sequence of the GAPDH gene. In some embodiments, the break is located within the last 200 base pairs of the endogenous coding sequence of the GAPDH gene. In some embodiments, the break is located within the last exon of the GAPDH gene.

[0343] In some embodiments, the nuclease is highly efficient, e.g., capable of editing at least about 60%, at least about 65%, at least about 75%, at least about 80%, at least about 85%, at least about 90%, at least about 95%, or more, of iPSCs contacted with the nuclease. In some embodiments, the nuclease is a zinc finger nuclease (ZFN), a transcription activator-like effector nuclease (TALEN) or a meganuclease. In some embodiments, the nuclease is a CRISPR/Cas nuclease and the method further comprises contacting the iPSC (or the population of iPSCs) with a guide molecule for the CRISPR/Cas nuclease. In some embodiments, the nuclease is a Cas9 or a Cas12a nuclease, or a variant thereof (e.g., a nuclease comprising the amino acid sequence of any one of SEQ ID NOs: 58-66). In some embodiments, the guide molecule comprises a targeting domain sequence that is complementary to a portion of the endogenous coding sequence of the GAPDH gene. In some embodiments, the guide molecule comprises a targeting domain sequence that differs by no more than 3 nucleotides from a sequence that is complementary to a portion of the endogenous coding sequence of the GAPDH gene. In some embodiments, the guide molecule specifically binds to the portion of the endogenous coding sequence of the GAPDH gene. In some embodiments, the guide molecule does not bind to an endogenous coding sequence of another gene, e.g., a different essential gene. In some embodiments, the guide comprises a nucleotide sequence of any one of SEQ ID NOs: 94-157 and 225-1885.

[0344] In some embodiments, the donor template is a donor DNA template, optionally wherein the donor DNA template is double-stranded. In some embodiments, the donor DNA template is a plasmid, optionally wherein the plasmid has not been linearized.

[0345] In some embodiments, the donor template comprises homology arms on either side of the knock-in cassette. In some embodiments, the donor template comprises a 5′ homology arm comprising a sequence homologous to a sequence located 5′ of the break in the genome of the iPSC. In some embodiments, the donor template comprises a 3′ homology arm comprising a sequence homologous to a sequence located 3′ of the break in the genome of the iPSC. In some embodiments, the donor template comprises a 5′ homology arm comprising a sequence homologous to a sequence located 5′ of the break in the genome of the iPSC, and the donor template comprises a 3′ homology arm comprising a sequence homologous to a sequence located 3′ of the break in the genome of the iPSC.

[0346] In some embodiments, the knock-in cassette comprises a regulatory element that enables expression of GAPDH and the gene product of interest as separate gene products, optionally, wherein at least one of the gene products is a protein and the regulatory element enables expression of that protein separate from the other gene product. In some embodiments, the knock-in cassette comprises an IRES or 2A element located between the exogenous coding sequence or partial coding sequence of the GAPDH gene and the exogenous coding sequence for the gene product of interest. In some embodiments, the 2A element is a T2A element (e.g., EGRGSLLTCGDVEENPGP), a P2A element (e.g., ATNFSLLKQAGDVEENPGP), a E2A element (e.g., QCTNYALLKLAGDVESNPGP), or an F2A element (e.g., VKQTLNFDLLKLAGDVESNPGP). In some embodiments, the knock-in cassette further comprises a sequence encoding a linker peptide upstream of the 2A element. In some embodiments, the linker peptide comprises the amino acid sequence GSG.

[0347] In some embodiments, the knock-in cassette comprises a polyadenylation sequence, and optionally a 3′ UTR sequence, downstream of the exogenous coding sequence for the gene product of interest, and, if a 3′UTR sequence is present, the 3′UTR sequence is positioned 3′ of the exogenous coding sequence and 5′ of the polyadenylation sequence.

[0348] In some embodiments, the exogenous partial coding sequence of the GAPDH gene in the knock-in cassette encodes a C-terminal fragment of GAPDH. In some embodiments, the C-terminal fragment is less than about 500, 250, 150, 125, 100, 75, 50, 25, 20, 15 or 10 amino acids in length. In some embodiments, the C-terminal fragment is less than about 25 amino acids in length. In some embodiments, the C-terminal fragment includes an amino acid sequence that is encoded by a region of the endogenous coding sequence of the GAPDH gene that spans the break.

[0349] In some embodiments, the exogenous coding sequence or partial coding sequence of the GAPDH gene in the knock-in cassette is less than 100% identical to the corresponding endogenous coding sequence of the GAPDH gene of the iPSC. In some embodiments, the exogenous coding sequence or partial coding sequence of the GAPDH gene in the knock-in cassette has been codon optimized relative to the corresponding endogenous coding sequence of the GAPDH gene of the iPSC to remove a target site of the nuclease, to reduce the likelihood of homologous recombination after integration of the knock-in cassette into the genome of the iPSC, or to increase expression of GAPDH and/or the gene product of interest after integration of the knock-in cassette into the genome of the iPSC.

[0350] In some embodiments, the nuclease is a Cas (e.g., Cas9 or Cas12a), the exogenous coding sequence or partial coding sequence of the GAPDH gene in the knock-in cassette includes at least one PAM site for the Cas, and the at least one PAM site (or all PAM sites) has been codon optimized or saturated with silent and/or missense mutations.

[0351] In some embodiments, the donor template does not comprise a reporter gene, e.g., a fluorescent reporter gene or an antibiotic resistance gene.

[0352] In some embodiments, the knock-in cassette is a multi-cistronic (e.g., bi-cistronic) knock-in cassette comprising exogenous coding sequences for two or more gene products of interest. In some embodiments, the knock-in cassette comprises a first exogenous coding sequence for a first gene product of interest, a linker (e.g., T2A, P2A, and/or IRES), and a second exogenous coding sequence for a second gene product of interest. In some embodiments, after contacting the population of iPSCs with the nuclease and the donor template, the genome-edited iPSC comprises knock-in cassettes at one or both alleles of the GAPDH gene. In some embodiments, the genome-edited iPSC expresses (a) the first and second gene products of interest, and (b) GAPDH, or a functional variant thereof.

[0353] In some embodiments, the system comprises a first a donor template that comprises a first knock-in cassette comprising a first exogenous coding sequence for a first gene product of interest in frame with and downstream (3′) of an exogenous coding sequence or partial coding sequence of the GAPDH gene, and with a second donor template that comprises a second knock-in cassette comprising a second exogenous coding sequence for a second gene product of interest in frame with and downstream (3′) of an exogenous coding sequence or partial coding sequence of the GAPDH gene. In some embodiments, after contacting the population of iPSCs with the nuclease and the donor templates, the genome-edited iPSC comprises the first knock-in cassette at a first allele of the GAPDH gene and the second knock-in cassette at the second allele of the GAPDH gene. In some embodiments, the genome-edited iPSC expresses (a) the first and second gene products of interest, and (b) GAPDH, or a functional variant thereof.

[0354] In some embodiments, after contacting the population of iPSCs with the nuclease and the donor template or templates, the iPSCs comprise multi-cistronic knock-ins (e.g., at one or both alleles of GAPDH gene) of two or more gene products of interest, e.g., one or more of the following gene products of interest, in order: PD-L1+CD47; CD47+PD-L1.

[0355] In another aspect, the disclosure features a donor template comprising a knock-in cassette with an exogenous coding sequence for a gene product of interest in frame with and downstream (3′) of an exogenous coding sequence or partial coding sequence of a GAPDH gene, wherein the gene product of interest is PD-L1 or leukocyte surface antigen cluster of differentiation CD47 (CD47).

[0356] In some embodiments, the donor template is for use in editing the genome of an iPSC by homology-directed repair (HDR).

[0357] In some embodiments, the donor template is a donor DNA template, optionally wherein the donor DNA template is double-stranded. In some embodiments, the donor DNA template is a plasmid, optionally wherein the plasmid has not been linearized.

[0358] In some embodiments, the donor template comprises homology arms on either side of the knock-in cassette. In some embodiments, the donor template comprises a 5′ homology arm comprising a sequence homologous to a sequence located 5′ of a target site in the genome of the iPSC. In some embodiments, the donor template comprises a 3′ homology arm comprising a sequence homologous to a sequence located 3′ of a target site in the genome of the iPSC. In some embodiments, the donor template comprises a 5′ homology arm comprising a sequence homologous to a sequence located 5′ of a target site in the genome of the iPSC, and the donor template comprises a 3′ homology arm comprising a sequence homologous to a sequence located 3′ of a target site in the genome of the iPSC.

[0359] In some embodiments, the knock-in cassette comprises a regulatory element that enables expression of GAPDH and the gene product of interest as separate gene products, optionally, wherein at least one of the gene products is a protein and the regulatory element enables expression of that protein separate from the other gene product. In some embodiments, the knock-in cassette comprises an IRES or 2A element located between the exogenous coding sequence or partial coding sequence of the GAPDH gene and the exogenous coding sequence for the gene product of interest. In some embodiments, the 2A element is a T2A element (e.g., EGRGSLLTCGDVEENPGP), a P2A element (e.g., ATNFSLLKQAGDVEENPGP), a E2A element (e.g., QCTNYALLKLAGDVESNPGP), or an F2A element (e.g., VKQTLNFDLLKLAGDVESNPGP). In some embodiments, the knock-in cassette further comprises a sequence encoding a linker peptide upstream of the 2A element. In some embodiments, the linker peptide comprises the amino acid sequence GSG.

[0360] In some embodiments, the knock-in cassette comprises a polyadenylation sequence, and optionally a 3′ UTR sequence, downstream of the exogenous coding sequence for the gene product of interest, and, if a 3′UTR sequence is present, the 3′UTR sequence is positioned 3′ of the exogenous coding sequence and 5′ of the polyadenylation sequence.

[0361] In some embodiments, the exogenous partial coding sequence of the GAPDH gene in the knock-in cassette encodes a C-terminal fragment of GAPDH. In some embodiments, the C-terminal fragment is less than about 500, 250, 150, 125, 100, 75, 50, 25, 20, 15 or 10 amino acids in length. In some embodiments, the C-terminal fragment is less than about 25 10 amino acids in length. In some embodiments, the C-terminal fragment includes an amino acid sequence that is encoded by a region of the endogenous coding sequence of the GAPDH gene.

[0362] In some embodiments, the exogenous coding sequence or partial coding sequence of the GAPDH gene in the knock-in cassette is less than 100% identical to the corresponding endogenous coding sequence of the GAPDH gene of the iPSC. In some embodiments, the exogenous coding sequence or partial coding sequence of the GAPDH gene in the knock-in cassette has been codon optimized relative to the corresponding endogenous coding sequence of the GAPDH gene of the iPSC to remove a target site of the nuclease, to reduce the likelihood of homologous recombination after integration of the knock-in cassette into the genome of the iPSC, or to increase expression of GAPDH and/or the gene product of interest after integration of the knock-in cassette into the genome of the iPSC.

[0363] In some embodiments, the nuclease is a Cas (e.g., Cas9 or Cas12a), the exogenous coding sequence or partial coding sequence of the GAPDH gene in the knock-in cassette includes at least one PAM site for the Cas, and the at least one PAM site (or all PAM sites) has been codon optimized or saturated with silent and/or missense mutations.

[0364] In some embodiments, the donor template does not comprise a reporter gene, e.g., a fluorescent reporter gene or an antibiotic resistance gene.

[0365] In another aspect, the disclosure features a method of producing a population of modified iPSCs, the method comprising contacting iPSCs with: (i) a nuclease that causes a break within an endogenous coding sequence of a GAPDH gene in a plurality of the iPSCs, and (ii) a donor template that comprises a knock-in cassette comprising an exogenous coding sequence for a gene product of interest in frame with and downstream (3′) of an exogenous coding sequence or partial coding sequence of the GAPDH gene, wherein the knock-in cassette is integrated into the genome of a plurality of the iPSCs by homology-directed repair (HDR) of the break, resulting in genome-edited iPSCs that expresses: (a) the gene product of interest, and (b) GAPDH, or a functional variant thereof, wherein the gene product of interest is PD-L1 or leukocyte surface antigen cluster of differentiation CD47 (CD47), and wherein following the contacting step, at least about 60%, at least about 65%, at least about 70%, at least about 75%, at least about 80%, at least about 85%, at least about 90%, at least about 95%, or more, of the viable iPSCs are genome-edited iPSCs, and/or about 40% or less, about 35% or less, about 30% or less, about 25% or less, about 20% or less, about 15% or less, about 10% or less, or about 5% or less, of the iPSCs lacking an integrated knock-in cassette are viable iPSCs, thereby producing a population of modified iPSCs. In some embodiments, following the contacting step, at least about 80% of the viable iPSCs are genome-edited iPSCs, and about 20% or less of the iPSCs lacking an integrated knock-in cassette are viable iPSCs. In some embodiments, following the contacting step, at least about 60% of the viable iPSCs are genome-edited iPSCs, and about 40% or less of the iPSCs lacking an integrated knock-in cassette are viable iPSCs. In some embodiments, following the contacting step, at least about 90% of the viable iPSCs are genome-edited iPSCs, and about 10% or less of the iPSCs lacking an integrated knock-in cassette are viable iPSCs. In some embodiments, following the contacting step, at least about 95% of the viable iPSCs are genome-edited iPSCs, and about 5% or less of iPSCs lacking an integrated knock-in cassette are viable iPSCs.

[0366] In some embodiments, if the knock-in cassette is not integrated into the genome of the iPSC by homology-directed repair (HDR) in the correct position or orientation, the iPSC no longer expresses GAPDH, or a functional variant thereof.

[0367] In some embodiments, the break is a double-strand break.

[0368] In some embodiments, the break is located within the last 2000, 1500, 1000, 750, 500, 400, 300, 200, 100, or 50 base pairs of the endogenous coding sequence of the GAPDH gene. In some embodiments, the break is located within the last 200 base pairs of the endogenous coding sequence of the GAPDH gene. In some embodiments, the break is located within the last exon of the GAPDH gene.

[0369] In some embodiments, the nuclease is highly efficient, e.g., capable of editing at least about 60%, at least about 65%, at least about 75%, at least about 80%, at least about 85%, at least about 90%, at least about 95%, or more, of iPSCs contacted with the nuclease. In some embodiments, the nuclease is a zinc finger nuclease (ZFN), a transcription activator-like effector nuclease (TALEN) or a meganuclease. In some embodiments, the nuclease is a CRISPR/Cas nuclease and the method further comprises contacting the iPSC (or the population of iPSCs) with a guide molecule for the CRISPR/Cas nuclease. In some embodiments, the nuclease is a Cas9 or a Cas12a nuclease, or a variant thereof (e.g., a nuclease comprising the amino acid sequence of any one of SEQ ID NOs: 58-66). In some embodiments, the guide molecule comprises a targeting domain sequence that is complementary to a portion of the endogenous coding sequence of the GAPDH gene. In some embodiments, the guide molecule comprises a targeting domain sequence that differs by no more than 3 nucleotides from a sequence that is complementary to a portion of the endogenous coding sequence of the GAPDH gene. In some embodiments, the guide molecule specifically binds to the portion of the endogenous coding sequence of the GAPDH gene. In some embodiments, the guide molecule does not bind to an endogenous coding sequence of another gene, e.g., a different essential gene. In some embodiments, the guide comprises a nucleotide sequence of any one of SEQ ID NOs: 94-157 and 225-1885.

[0370] In some embodiments, the donor template is a donor DNA template, optionally wherein the donor DNA template is double-stranded. In some embodiments, the donor DNA template is a plasmid, optionally wherein the plasmid has not been linearized.

[0371] In some embodiments, the donor template comprises homology arms on either side of the knock-in cassette. In some embodiments, the donor template comprises a 5′ homology arm comprising a sequence homologous to a sequence located 5′ of the break in the genome of the iPSC. In some embodiments, the donor template comprises a 3′ homology arm comprising a sequence homologous to a sequence located 3′ of the break in the genome of the iPSC. In some embodiments, the donor template comprises a 5′ homology arm comprising a sequence homologous to a sequence located 5′ of the break in the genome of the iPSC, and the donor template comprises a 3′ homology arm comprising a sequence homologous to a sequence located 3′ of the break in the genome of the iPSC.

[0372] In some embodiments, the knock-in cassette comprises a regulatory element that enables expression of GAPDH and the gene product of interest as separate gene products, optionally, wherein at least one of the gene products is a protein and the regulatory element enables expression of that protein separate from the other gene product. In some embodiments, the knock-in cassette comprises an IRES or 2A element located between the exogenous coding sequence or partial coding sequence of the GAPDH gene and the exogenous coding sequence for the gene product of interest. In some embodiments, the 2A element is a T2A element (e.g., EGRGSLLTCGDVEENPGP), a P2A element (e.g., ATNFSLLKQAGDVEENPGP), a E2A element (e.g., QCTNYALLKLAGDVESNPGP), or an F2A element (e.g., VKQTLNFDLLKLAGDVESNPGP). In some embodiments, the knock-in cassette further comprises a sequence encoding a linker peptide upstream of the 2A element. In some embodiments, the linker peptide comprises the amino acid sequence GSG.

[0373] In some embodiments, the knock-in cassette comprises a polyadenylation sequence, and optionally a 3′ UTR sequence, downstream of the exogenous coding sequence for the gene product of interest, and, if a 3′UTR sequence is present, the 3′UTR sequence is positioned 3′ of the exogenous coding sequence and 5′ of the polyadenylation sequence.

[0374] In some embodiments, the exogenous partial coding sequence of the GAPDH gene in the knock-in cassette encodes a C-terminal fragment of GAPDH. In some embodiments, the C-terminal fragment is less than about 500, 250, 150, 125, 100, 75, 50, 25, 20, 15 or 10 amino acids in length. In some embodiments, the C-terminal fragment is less than about 25 amino acids in length. In some embodiments, the C-terminal fragment includes an amino acid sequence that is encoded by a region of the endogenous coding sequence of the GAPDH gene that spans the break.

[0375] In some embodiments, the exogenous coding sequence or partial coding sequence of the GAPDH gene in the knock-in cassette is less than 100% identical to the corresponding endogenous coding sequence of the GAPDH gene of the iPSC. In some embodiments, the exogenous coding sequence or partial coding sequence of the GAPDH gene in the knock-in cassette has been codon optimized relative to the corresponding endogenous coding sequence of the GAPDH gene of the iPSC to remove a target site of the nuclease, to reduce the likelihood of homologous recombination after integration of the knock-in cassette into the genome of the iPSC, or to increase expression of GAPDH and/or the gene product of interest after integration of the knock-in cassette into the genome of the iPSC.

[0376] In some embodiments, the nuclease is a Cas (e.g., Cas9 or Cas12a), the exogenous coding sequence or partial coding sequence of the GAPDH gene in the knock-in cassette includes at least one PAM site for the Cas, and the at least one PAM site (or all PAM sites) has been codon optimized or saturated with silent and/or missense mutations.

[0377] In some embodiments, the donor template does not comprise a reporter gene, e.g., a fluorescent reporter gene or an antibiotic resistance gene.

[0378] In some embodiments, the knock-in cassette is a multi-cistronic (e.g., bi-cistronic) knock-in cassette comprising exogenous coding sequences for two or more gene products of interest. In some embodiments, the knock-in cassette comprises a first exogenous coding sequence for a first gene product of interest, a linker (e.g., T2A, P2A, and/or IRES), and a second exogenous coding sequence for a second gene product of interest. In some embodiments, the genome-edited iPSCs comprise knock-in cassettes at one or both alleles of the GAPDH gene. In some embodiments, the genome-edited iPSCs express (a) the first and second gene products of interest, and (b) GAPDH, or a functional variant thereof.

[0379] In some embodiments, the method comprises contacting iPSCs (or the population of iPSCs) with a first a donor template that comprises a first knock-in cassette comprising a first exogenous coding sequence for a first gene product of interest in frame with and downstream (3′) of an exogenous coding sequence or partial coding sequence of the GAPDH gene, and with a second donor template that comprises a second knock-in cassette comprising a second exogenous coding sequence for a second gene product of interest in frame with and downstream (3′) of an exogenous coding sequence or partial coding sequence of the GAPDH gene. In some embodiments, the genome-edited iPSCs comprise the first knock-in cassette at a first allele of the GAPDH gene and the second knock-in cassette at the second allele of the GAPDH gene. In some embodiments, the genome-edited iPSCs express (a) the first and second gene products of interest, and (b) GAPDH, or a functional variant thereof.

[0380] In some embodiments, the genome-edited iPSCs comprise multi-cistronic knock-ins (e.g., at one or both alleles of GAPDH gene) of two or more gene products of interest, e.g., one or more of the following gene products of interest, in order: PD-L1+CD47; CD47+PD-L1.

[0381] In another aspect, the disclosure features a method of selecting and/or identifying an iPSC comprising a knock-in of a gene product of interest within an endogenous coding sequence of a GAPDH gene in the iPSC, the method comprising contacting a population of iPSCs with: (i) a nuclease that causes a break within an endogenous coding sequence of a GAPDH gene in a plurality of the iPSCs, and (ii) a donor template that comprises a knock-in cassette comprising an exogenous coding sequence for a gene product of interest in frame with and downstream (3′) of an exogenous coding sequence or partial coding sequence of the GAPDH gene, wherein the knock-in cassette is integrated into the genome of a plurality of the iPSCs by homology-directed repair (HDR) of the break, and identifying a genome-edited iPSC within the population of iPSCs that expresses: (a) the gene product of interest, and (b) GAPDH, or a functional variant thereof, wherein the gene product of interest is PD-L1 or leukocyte surface antigen cluster of differentiation CD47 (CD47).

[0382] In some embodiments, following the contacting step, at least about 60%, at least about 65%, at least about 70%, at least about 75%, at least about 80%, at least about 85%, at least about 90%, at least about 95%, or more, of the viable iPSCs of the population of iPSCs are genome-edited iPSCs, and/or about 40% or less, about 35% or less, about 30% or less, about 25% or less, about 20% or less, about 15% or less, about 10% or less, or about 5% or less, of the population of iPSCs lacking an integrated knock-in cassette are iPSCs. In some embodiments, following the contacting step, at least about 80% of the viable iPSCs of the population of iPSCs are genome-edited iPSCs, and about 20% or less of the population of iPSCs lacking an integrated knock-in cassette are viable iPSCs. In some embodiments, following the contacting step, at least about 60% of the viable iPSCs of the population of iPSCs are genome-edited iPSCs, and about 40% or less of the population of iPSCs lacking an integrated knock-in cassette are viable iPSCs. In some embodiments, following the contacting step, at least about 90% of the viable iPSCs of the population of iPSCs are genome-edited iPSCs, and about 10% or less of the population of iPSCs lacking an integrated knock-in cassette are viable iPSCs. In some embodiments, following the contacting step, at least about 95% of the viable iPSCs of the population of iPSCs are genome-edited iPSCs, and about 5% or less of the population of iPSCs lacking an integrated knock-in cassette are viable iPSCs.

[0383] In some embodiments, if the knock-in cassette is not integrated into the genome of the iPSC by homology-directed repair (HDR) in the correct position or orientation, the iPSC no longer expresses GAPDH, or a functional variant thereof.

[0384] In some embodiments, the break is a double-strand break.

[0385] In some embodiments, the break is located within the last 2000, 1500, 1000, 750, 500, 400, 300, 200, 100, or 50 base pairs of the endogenous coding sequence of the GAPDH gene. In some embodiments, the break is located within the last 200 base pairs of the endogenous coding sequence of the GAPDH gene. In some embodiments, the break is located within the last exon of the GAPDH gene.

[0386] In some embodiments, the nuclease is highly efficient, e.g., capable of editing at least about 60%, at least about 65%, at least about 75%, at least about 80%, at least about 85%, at least about 90%, at least about 95%, or more, of iPSCs contacted with the nuclease. In some embodiments, the nuclease is a zinc finger nuclease (ZFN), a transcription activator-like effector nuclease (TALEN) or a meganuclease. In some embodiments, the nuclease is a CRISPR/Cas nuclease and the method further comprises contacting the iPSC (or the population of iPSCs) with a guide molecule for the CRISPR/Cas nuclease. In some embodiments, the nuclease is a Cas9 or a Cas12a nuclease, or a variant thereof (e.g., a nuclease comprising the amino acid sequence of any one of SEQ ID NOs: 58-66). In some embodiments, the guide molecule comprises a targeting domain sequence that is complementary to a portion of the endogenous coding sequence of the GAPDH gene. In some embodiments, the guide molecule comprises a targeting domain sequence that differs by no more than 3 nucleotides from a sequence that is complementary to a portion of the endogenous coding sequence of the GAPDH gene. In some embodiments, the guide molecule specifically binds to the portion of the endogenous coding sequence of the GAPDH gene. In some embodiments, the guide molecule does not bind to an endogenous coding sequence of another gene, e.g., a different essential gene. In some embodiments, the guide comprises a nucleotide sequence of any one of SEQ ID NOs: 94-157 and 225-1885.

[0387] In some embodiments, the donor template is a donor DNA template, optionally wherein the donor DNA template is double-stranded. In some embodiments, the donor DNA template is a plasmid, optionally wherein the plasmid has not been linearized.

[0388] In some embodiments, the donor template comprises homology arms on either side of the knock-in cassette. In some embodiments, the donor template comprises a 5′ homology arm comprising a sequence homologous to a sequence located 5′ of the break in the genome of the iPSC. In some embodiments, the donor template comprises a 3′ homology arm comprising a sequence homologous to a sequence located 3′ of the break in the genome of the iPSC. In some embodiments, the donor template comprises a 5′ homology arm comprising a sequence homologous to a sequence located 5′ of the break in the genome of the iPSC, and the donor template comprises a 3′ homology arm comprising a sequence homologous to a sequence located 3′ of the break in the genome of the iPSC.

[0389] In some embodiments, the knock-in cassette comprises a regulatory element that enables expression of GAPDH and the gene product of interest as separate gene products, optionally, wherein at least one of the gene products is a protein and the regulatory element enables expression of that protein separate from the other gene product. In some embodiments, the knock-in cassette comprises an IRES or 2A element located between the exogenous coding sequence or partial coding sequence of the GAPDH gene and the exogenous coding sequence for the gene product of interest. In some embodiments, the 2A element is a T2A element (e.g., EGRGSLLTCGDVEENPGP), a P2A element (e.g., ATNFSLLKQAGDVEENPGP), a E2A element (e.g., QCTNYALLKLAGDVESNPGP), or an F2A element (e.g., VKQTLNFDLLKLAGDVESNPGP). In some embodiments, the knock-in cassette further comprises a sequence encoding a linker peptide upstream of the 2A element. In some embodiments, the linker peptide comprises the amino acid sequence GSG.

[0390] In some embodiments, the knock-in cassette comprises a polyadenylation sequence, and optionally a 3′ UTR sequence, downstream of the exogenous coding sequence for the gene product of interest, and, if a 3′UTR sequence is present, the 3′UTR sequence is positioned 3′ of the exogenous coding sequence and 5′ of the polyadenylation sequence.

[0391] In some embodiments, the exogenous partial coding sequence of the GAPDH gene in the knock-in cassette encodes a C-terminal fragment of GAPDH. In some embodiments, the C-terminal fragment is less than about 500, 250, 150, 125, 100, 75, 50, 25, 20, 15 or 10 amino acids in length. In some embodiments, the C-terminal fragment is less than about 25 amino acids in length. In some embodiments, the C-terminal fragment includes an amino acid sequence that is encoded by a region of the endogenous coding sequence of the GAPDH gene that spans the break.

[0392] In some embodiments, the exogenous coding sequence or partial coding sequence of the GAPDH gene in the knock-in cassette is less than 100% identical to the corresponding endogenous coding sequence of the GAPDH gene of the iPSC. In some embodiments, the exogenous coding sequence or partial coding sequence of the GAPDH gene in the knock-in cassette has been codon optimized relative to the corresponding endogenous coding sequence of the GAPDH gene of the iPSC to remove a target site of the nuclease, to reduce the likelihood of homologous recombination after integration of the knock-in cassette into the genome of the iPSC, or to increase expression of GAPDH and/or the gene product of interest after integration of the knock-in cassette into the genome of the iPSC.

[0393] In some embodiments, the nuclease is a Cas (e.g., Cas9 or Cas12a), the exogenous coding sequence or partial coding sequence of the GAPDH gene in the knock-in cassette includes at least one PAM site for the Cas, and the at least one PAM site (or all PAM sites) has been codon optimized or saturated with silent and/or missense mutations.

[0394] In some embodiments, the donor template does not comprise a reporter gene, e.g., a fluorescent reporter gene or an antibiotic resistance gene.

[0395] In some embodiments, the knock-in cassette is a multi-cistronic (e.g., bi-cistronic) knock-in cassette comprising exogenous coding sequences for two or more gene products of interest. In some embodiments, the knock-in cassette comprises a first exogenous coding sequence for a first gene product of interest, a linker (e.g., T2A, P2A, and/or IRES), and a second exogenous coding sequence for a second gene product of interest. In some embodiments, the genome-edited iPSC comprises knock-in cassettes at one or both alleles of the GAPDH gene. In some embodiments, the genome-edited iPSC expresses (a) the first and second gene products of interest, and (b) GAPDH, or a functional variant thereof.

[0396] In some embodiments, the method comprises contacting the population of iPSCs with a first a donor template that comprises a first knock-in cassette comprising a first exogenous coding sequence for a first gene product of interest in frame with and downstream (3′) of an exogenous coding sequence or partial coding sequence of the GAPDH gene, and with a second donor template that comprises a second knock-in cassette comprising a second exogenous coding sequence for a second gene product of interest in frame with and downstream (3′) of an exogenous coding sequence or partial coding sequence of the GAPDH gene. In some embodiments, the genome-edited iPSCs comprise the first knock-in cassette at a first allele of the GAPDH gene and the second knock-in cassette at the second allele of the GAPDH gene. In some embodiments, the genome-edited iPSCs express (a) the first and second gene products of interest, and (b) GAPDH, or a functional variant thereof.

[0397] In some embodiments, the genome-edited iPSCs comprise multi-cistronic knock-ins (e.g., at one or both alleles of GAPDH gene) of two or more gene products of interest, e.g., one or more of the following gene products of interest, in order: PD-L1+CD47; CD47+PD-L1.

[0398] In another aspect, the disclosure features a method of generating a genetically modified mammalian cell comprising a coding sequence for a gene product of interest at a pre-determined genomic position, comprising: providing at least one donor template comprising the coding sequence for a gene product of interest flanked by a first homologous arm and a second homology arm, wherein the first and second homology arms are essentially homologous to a first genomic region (GR) and a second GR, respectively, wherein the first GR and the second GR are adjacent to and flank a pre-determined genomic position in an exon of an essential gene in a mammalian cell, wherein the cell becomes inviable if the exon is disrupted; providing a gene editing system containing a nuclease that is targeted to the pre-determined genomic position; introducing the at least one donor template and the gene editing system into a population of mammalian cells; culturing the population of mammalian cells; and identifying a surviving cell that comprises the coding sequence for the gene product of interest, wherein the identified surviving cell is a genetically modified mammalian cell comprising the coding sequence for the gene product of interest at the pre-determined genomic position. In another aspect, the disclosure features a method of selecting a mammalian cell comprising a coding sequence for a gene product of interest that has integrated precisely at a pre-determined genomic position, comprising: providing at least one donor template comprising the coding sequence for the gene product of interest flanked by a first homology arm and a second homology arm, wherein the first and second homology arms are essentially homologous to a first genomic region (GR) and a second GR, respectively, wherein the first GR and the second GR are adjacent to and flank a pre-determined genomic position in an exon of an essential gene in a mammalian cell, wherein the cell becomes inviable if the exon is disrupted; providing a gene editing system containing a nuclease that is targeted to the pre-determined genomic position; introducing the donor template and the gene editing system into a population of mammalian cells; culturing the population of mammalian cells; and identifying a surviving cell that comprises the coding sequence for a gene product of interest, wherein the identified surviving cell comprises the coding sequence for a gene product of interest integrated precisely at the pre-determined genomic position.

[0399] In some embodiments, the exon is the last or penultimate exon of the essential gene if the essential gene has more than one exon. In some embodiments, the pre-determined genomic position in the exon of the essential gene is within about 200 bps upstream of a stop codon, or within about 200 bps downstream of a start codon, of the essential gene.

[0400] In some embodiments, the gene editing system is a meganuclease based system, a zinc finger nuclease (ZFN) based system, a transcription activator-like effector based nuclease (TALEN) system, a CRISPR based system, or a NgAgo based system.

[0401] In some embodiments, the gene editing system is a CRISPR based system comprising a nuclease, or an mRNA or DNA encoding a nuclease, and a guide RNA (gRNA) that targets the pre-determined genomic position, optionally wherein the gene editing system is a ribonucleoprotein (RNP) complex comprising the nuclease and the gRNA.

[0402] In some embodiments, the nuclease is Cas5, Cash, Cas7, Cas9 (optionally saCas9 or spCas9), Cas12a, or Csm1.

[0403] In some embodiments, the essential gene is selected from the gene loci listed in Table 3 or 4. In some embodiments, the essential gene is GAPDH, RPL13A, RPL7, or RPLP0 gene.

[0404] In some embodiments, the first homology arm and/or the second homology arm comprise a silent PAM blocking mutation or a codon modification that prevents cleavage of the donor template by the nuclease such that the essential gene locus, once modified, is not cleaved by the nuclease.

[0405] In some embodiments, the coding sequence for the gene product of interest is linked in frame to the essential gene sequence through a coding sequence for a self-cleaving peptide, or the coding sequence for the gene product of interest contains an internal ribosomal entry site (IRES) at the 5′ end.

[0406] In some embodiments, the gene product of interest is a therapeutic protein (optionally an antibody, an engineered antigen receptor, or an antigen-binding fragment thereof), an immunomodulatory protein, a reporter protein, or a safety switch signal.

[0407] In some embodiments, the method further comprises contacting the population of mammalian cells with an inhibitor of non-homologous end joining.

[0408] In some embodiments, the population of mammalian cells are human cells. In some embodiments, the populations of mammalian cells are pluripotent stem cells (PSCs). In some embodiments, the PSCs are embryonic stem cells or induced PSCs (iPSCs).

[0409] In some embodiments, the method comprises providing more than one donor template. In some embodiments, each donor template is targeted to the essential gene. In some embodiments, each donor template comprises a different genomic sequence. In some embodiments, each donor template comprises coding sequence for more than one gene product of interest.

[0410] In some embodiments, the genomic sequences from one donor template are incorporated into one allele of the essential gene and the genomic sequences from the other donor template are incorporated into the other allele of the essential gene. In some embodiments, each donor template comprises coding sequence for more than one gene product of interest.

[0411] In some embodiments, each donor template comprises at least one safety switch. In some embodiments, each donor template comprises at least one component of a safety switch. In some embodiments, the safety switch requires dimerization to function as a suicide switch.

[0412] In some embodiments, the method further comprising the additional steps of providing to the surviving cells, the gene editing system containing a nuclease that is targeted to the pre-determined genomic position; optionally reintroducing the at least one donor template, to obtain a second population of mammalian cells; culturing the second population of mammalian cells; and identifying a surviving cell from the second population of mammalian cells that comprises the coding sequences for gene products of interest from the donor templates; wherein the identified surviving cell from the second population of mammalian cells is a genetically modified mammalian cell comprising the coding sequences for gene products of interest from donor templates at the pre-determined genomic position.

[0413] In some embodiments, the percentage of surviving cells from the second culturing step comprising the coding sequences for gene products of interest is enriched at least four-fold from the surviving cells from the first culturing step comprising the coding sequences for gene products of interest. In some embodiments, the percentage of surviving cells from the second culturing step comprising the coding sequences for gene products of interest from the donor templates is at least 2%.

[0414] In some embodiments, the method further comprises separating a mammalian cell comprising the coding sequences for gene products of interest from the donor templates. In some embodiments, the method further comprises growing the mammalian cell comprising the coding sequences for gene products of interest from the donor templates into a plurality of cells comprising the coding sequences for gene products of interest from the donor templates.

[0415] In some embodiments, the population of mammalian cells are PSCs. In some embodiments, the PSCs are embryonic stem cells or iPSCs.

[0416] In another aspect, the disclosure features a genetically engineered cell obtainable by any of the methods described herein. In some embodiments, the genetically engineered cell is a PSC. In some embodiments, the genetically engineered cell is an iPSC.

[0417] In another aspect, the disclosure features a method of obtaining a differentiated cell, comprising culturing a genetically engineered iPSC obtainable by any of the methods described herein in a culture medium that allows differentiation of the iPSC into the differentiated cell, or a genetically modified differentiated cell obtained by such method. In some embodiments, the differentiated cell is an immune cell, optionally selected from a T cell, a T cell expressing a chimeric antigen receptor (CAR), a suppressive T cell, a myeloid cell, a dendritic cell, and an immunosuppressive macrophage; a cell in the nervous system, optionally selected from dopaminergic neuron, a microglial cell, an oligodendrocyte, an astrocyte, a cortical neuron, a spinal or oculomotor neuron, an enteric neuron, a Placode-derived cell, a Schwann cell, and a trigeminal or sensory neuron; a cell in the ocular system, optionally selected from a retinal pigment epithelial cell, a photoreceptor cone cell, a photoreceptor rod cell, a bipolar cell, and a ganglion cell; a cell in the cardiovascular system, optionally selected from a cardiomyocyte, an endothelial cell, and a nodal cell; or a cell in the metabolic system, optionally selected from a hepatocyte, a cholangiocyte, and a pancreatic beta cell. In some embodiments, the differentiated cell is a human cell.

[0418] In another aspect, the disclosure features a pharmaceutical composition comprising any of the cells described herein. In another aspect, the disclosure features a method of treating a human patient in need thereof, comprising introducing the pharmaceutical composition to the patient, wherein the pharmaceutical composition comprises differentiated human cells. In another aspect, the disclosure features the pharmaceutical composition for use in treating a human patient in need thereof, wherein the pharmaceutical composition comprises differentiated human cells. In another aspect, the disclosure features use of the pharmaceutical composition for the manufacture of a medicament in treating a human patient in need thereof, wherein the pharmaceutical composition comprises differentiated human cells. In some embodiments, the differentiated human cells are autologous or allogenic cells.

[0419] In another aspect, the disclosure features a system for editing the genome of a mammalian cell, the system comprising a population of mammalian cells, a nuclease that causes a break within an endogenous coding sequence of an essential gene of the mammalian cell, and a plurality of donor templates each comprising a knock-in cassette comprising an exogenous coding sequence for a gene product of interest in frame with and downstream (3′) of an exogenous coding sequence or partial coding sequence of the essential gene, and wherein after contacting the population of mammalian cells with the nuclease and the donor templates, and optionally contacting the population of mammalian cells with the nuclease and optionally the donor templates a second time, at least about 2% of the viable cells of the population of mammalian cells are genome-edited cells that expresses the gene products of interest from the plurality of donor templates. In some embodiments, the essential gene is GAPDH.

[0420] In some embodiments, the mammalian cell is a PSC. In some embodiments, the mammalian cell is an iPSC.

[0421] In some embodiments, the break is a double-strand break. In some embodiments, the break is located within the last 1000, 500, 400, 300, 200, 100 or 50 base pairs of the coding sequence of the GAPDH gene. In some embodiments, the break is located within the last exon of the GAPDH gene.

[0422] In some embodiments, the nuclease is a CRISPR/Cas nuclease and the system further comprises a guide molecule for the CRISPR/Cas nuclease. In some embodiments, the nuclease is a zinc finger nuclease (ZFN), a transcription activator-like effector nuclease (TALEN) or a meganuclease.

[0423] In some embodiments, the donor templates are donor DNA templates, optionally wherein the donor DNA templates are double-stranded. In some embodiments, the donor templates comprise homology arms on either side of the exogenous coding sequences. In some embodiments, the homology arms correspond to sequences located on either side of the break in the genome of the mammalian cell.

### BRIEF DESCRIPTION OF THE DRAWING

[0424] The teachings described herein will be more fully understood from the following description of various exemplary embodiments, when read together with the accompanying drawing. It should be understood that the drawing described below is for illustration purposes only and is not intended to limit the scope of the present teachings in any way.

[0425] FIG. 1 shows the locations on the GAPDH gene where exemplary AsCpf1 (AsCas12a) guide RNAs bind, and the results of screening the exemplary guide RNAs that target the GAPDH gene three days after transfection. Results are from gDNA from living cells.

[0426] FIG. 2 shows results of screening the exemplary AsCpf1 (AsCas12a) guide RNAs that target the GAPDH gene, three days after transfection. Results are from gDNA from living cells.

[0427] FIG. 3A shows an exemplary integration strategy that targets an essential gene according to certain embodiments of the present disclosure. In particular embodiments, introducing a double strand break using CRISPR gene editing (e.g., by Cas12a or Cas9) within a terminal exon (e.g., within about 500 bp upstream (5′) of the stop codon of the essential gene) and administering a donor plasmid with homology arms designed to mediate homology directed repair (HDR) at the cleavage site, results in a population of viable cells carrying a cargo of interest integrated at the essential gene locus. Those cells that were edited the CRISPR nuclease, but failed to undergo integration of the cargo at the essential gene locus, do not survive.

[0428] FIG. 3B shows an exemplary integration strategy that targets the GAPDH gene according to certain embodiments of the present disclosure. Although FIG. 3B shows a strategy wherein the GAPDH gene is modified in an induced pluripotent stem cell (iPSC), this strategy can be applied to a variety of cell types, including primary cells, stem cells, and cells differentiated from iPSCs.

[0429] FIG. 3C shows an exemplary integration strategy that targets the GAPDH gene according to certain embodiments of the present disclosure. The diagram shows that the only cells that should survive over time are those cells that underwent targeted integration of a cassette that restores the GAPDH locus and includes a cargo of interest, as well as unedited cells. The population of unedited cells following CRISPR editing should be small if the nuclease and guide RNA are highly effective at cleaving the essential gene target site and introduce indels that significantly reduce the function of the essential gene product.

[0430] FIG. 3D shows an exemplary integration strategy that targets an essential gene according to certain embodiments of the present disclosure. In particular embodiments, introducing a double strand break using CRISPR gene editing (e.g., by Cas12a or Cas9) to target a 5′ exon (e.g., within about 500 bp downstream (3′) of a start codon of the essential gene) and administering a donor plasmid with homology arms designed to mediate homology directed repair (HDR) at the cleavage site, results in a population of viable cells carrying a cargo of interest integrated at the essential gene locus. Those cells that were edited the CRISPR nuclease, but failed to undergo integration of the cargo at the essential gene locus, do not survive.

[0431] FIG. 4 shows editing efficiency at different concentrations (0.625 μM to 4 μM) of an exemplary AsCpf1 (AsCas12a) guide RNA that targets the GAPDH gene.

[0432] FIG. 5 shows the knock-in (KI) efficiency of a CD47 encoding “cargo” in the GAPDH gene 4 days post-electroporation when the dsDNA plasmid (“PLA”) was also present. Knock-in efficiency was measured with two different concentrations of the plasmid. Knock-in was measured using ddPCR targeting the 3′ positions of the knock-in “cargo”.

[0433] FIG. 6 shows the knock-in efficiency of a CD47 encoding “cargo” in the GAPDH gene 9 days post-electroporation when the dsDNA plasmid was also present. Knock-in was measured using ddPCR both targeting the 5′ and 3′ positions of the knock-in “cargo”, increasing the reliability of the result.

[0434] FIG. 7 maps AsCpf1 (AsCas12a) guide RNAs that target terminal exons of the RPLP0 gene.

[0435] FIG. 8 maps AsCpf1 (AsCas12a) guide RNAs that target terminal exons of the RPLP0 gene.

[0436] FIG. 9 maps AsCpf1 (AsCas12a) guide RNAs that target terminal exons of the RPL13A gene.

[0437] FIG. 10 maps AsCpf1 (AsCas12a) guide RNAs that target terminal exons of the RPL13A gene.

[0438] FIG. 11 maps AsCpf1 (AsCas12a) guide RNAs that target terminal exons of the RPL7 gene.

[0439] FIG. 12 maps AsCpf1 (AsCas12a) guide RNAs that target terminal exons of the RPL7 gene.

[0440] FIG. 13 shows the efficiency of integration of a knock-in cassette, comprising a GFP protein encoding “cargo” sequence, into the GAPDH locus of iPSCs, measured 7 days following transfection. (A) Depicts exemplary microscopy (brightfield and fluorescent) images, and (B) depicts exemplary flow cytometry data. Images and flow cytometry data depict insertion rates for cargo transfection alone (PLA1593 or PLA1651) compared to cargo and guide RNA transfections (RSQ22337+PLA1593 or RSQ24570+PLA1651), additionally, insertion rates with an exemplary exonic coding region targeting guide RNA with appropriate cargo (RSQ22337+PLA1593) are compared to insertion rates with an intronic targeting guide RNA with appropriate cargo (RSQ24570+PLA1651).

[0441] FIG. 14A depicts a schematic representation of a bicistronic knock-in cassette (e.g., comprising two cistrons separated by a linker) for insertion into the GAPDH locus, the leading GAPDH Exon 9 coding region and exogenous sequences encoding proteins of interest are separated by linker sequences, the second GAPDH allele can comprise a target knock-in cassette insertion, indels, or is wild type (WT).

[0442] FIG. 14B depicts a schematic representation of bi-allelic knock-in cassettes for insertion into the GAPDH locus. Exogenous “cargo” sequences encoding proteins of interest are located on different knock-in cassettes, for each construct, the leading GAPDH Exon 9 coding region is separated from an exogenous sequence encoding a protein of interest by a linker sequence.

[0443] FIG. 15A depicts a schematic representation of a bicistronic knock-in cassette for insertion into the GAPDH locus, with the leading GAPDH Exon 9 coding region and exogenous sequences encoding GFP and mCherry separated by linker sequences P2A, T2A, and/or IRES.

[0444] FIG. 15B is a panel of exemplary microscopic images (brightfield and fluorescent) of iPSCs nine days following nucleofection of RNPs comprising RSQ22337 (SEQ ID NO: 95) targeting GAPDH and Cas12a (SEQ ID NO: 62) and a bicistronic knock-in cassette comprising “cargo” sequence encoding GFP and mCherry molecules inserted at the GAPDH locus. iPSCs comprising exemplary “cargo” molecules PLA1582 (comprising donor template SEQ ID NO: 41) with linkers P2A and T2A, PLA1583 (comprising donor template SEQ ID NO: 42) with linkers T2A and P2A, and PLA1584 (comprising donor template SEQ ID NO: 43) with linkers T2A and IRES are shown. Results show that at least two different cargos can be inserted in a bicistronic manner and expression is detectable irrespective of linker type used. All images were taken at 2×100 μm on a Keyence Microscope.

[0445] FIG. 15C depicts expression quantification (Y axis) of exemplary “cargo” molecules GFP and mCherry from various bicistronic molecules comprising the described linker pairs (X axis). mCherry as a sole “cargo” protein was utilized as a relative control.

[0446] FIG. 16A depicts exemplary flow cytometry data for bi-allelic GFP and mCherry knock-in at the GAPDH gene.

[0447] FIG. 16B depicts fluorescence imaging of cell populations prior to flow cytometry analysis following bi-allelic GFP and mCherry knock-in at the GAPDH gene.

[0448] FIG. 16C are histograms depicting exemplary flow cytometry analysis data for bi-allelic GFP and mCherry knock-in at the GAPDH gene. Cells were nucleofected with 0.5 μM RNPs comprising Cas12a (SEQ ID NO: 62) and RSQ22337 (SEQ ID NO: 95), and 2.5 μg (5 trials) or 5 μg (1 trial) GFP and mCherry donor templates.

[0449] FIG. 17A depicts exemplary flow cytometry data for GFP expression in iPSCs seven days after being transfected with a gRNA and an appropriate donor template comprising a knock-in cassette with a “cargo” sequence encoding GFP that was recombined into various loci.

[0450] FIG. 17B depicts the percentage of cells having editing events as measured by Inference of CRISPR Edits (ICE) assays 48 hours after being transfected with the noted gRNA.

[0451] FIG. 17C depicts relative integrated “cargo” (GFP) expression intensity as determined by flow cytometry conducted with an FITC channel to filter GFP signal for iPSCs transfected with the noted exemplary gRNA and knock-in cassette combinations.

[0452] FIG. 18 depicts exemplary flow cytometry data highlighting the efficiency of integration of a donor template comprising a knock-in cassette comprising a GFP protein encoding “cargo” sequence, into the TBP locus of iPSCs.

[0453] FIG. 19 is exemplary ddPCR results describing knock-in cassette integration ratios in GAPDH or TBP alleles in an iPSC population.

[0454] FIG. 20 is a histogram representation of exemplary flow cytometry data for AAV6 mediated knock-in of GFP into T cells using RNPs comprising RSQ22337 targeting GAPDH and Cas12a (SEQ ID NO: 62) at various concentrations of RNP and various AAV6 multiplicity of infection (MOI) rates (vg/cell) measured seven days after electroporation and transduction. The Y axis represents percentage cell population expressing GFP, while the X axis depicts AAV6 MOI.

[0455] FIG. 21 is a histogram representation of exemplary flow cytometry data depicting cell viability following AAV6 mediated knock-in of GFP at the GAPDH gene in differentiated cells. Depicted is T cell viability four days after AAV6 mediated transduction of a GFP cargo and electroporated with 1 μM RNPs comprising RSQ22337 and Cas12a (SEQ ID NO: 62); the Y axis notes cell viability as a function of total cell population, while the X axis lists various MOIs used to transduce the cells.

[0456] FIG. 22A depicts exemplary flow cytometry charts for a population of T cells transduced by AAV6 comprising a knock-in GFP cargo targeting GAPDH at 5E4 MOI and transformed with 4 μM RNP comprising Cas12a (SEQ NO: 62) and RSQ22337.

[0457] FIG. 22B depicts exemplary control experiment flow cytometry charts for T cells that were not transduced by AAV6, but solely transformed with 4 μM RNP comprising Cas12a (SEQ NO: 62) and RSQ22337.

[0458] FIG. 23 are histograms depicting exemplary flow cytometry data for AAV6 mediated knock-in of GFP into T cells at either the GAPDH locus using RNPs comprising RSQ22337 and Cas12a (SEQ ID NO: 62), or at the TRAC locus. Integration constructs each comprised homology arms approximately 500 bp in length, and T cells were transduced with the same concentration of RNP and AAV MOI. The mean and standard deviation of three independent biological replicates is shown, significant differences in targeted integration were observed (p=0.0022 using unpaired t-test).

[0459] FIG. 24A is a histogram depicting the knock-in efficiency of CD16 encoding “cargo” integrated at the GAPDH gene of iPSCs. Targeting integration (TI) was measured at day 0 and day 19 of bulk edited cell populations using ddPCR targeting the 5′ (5′ assay) and 3′ (3′ assay) positions of the knock-in cargo.

[0460] FIG. 24B is a histogram depicting the genotypes of iPSC clones with CD16 encoding “cargo” integrated at the GAPDH gene, measured using ddPCR targeting the 5′ (5′ CDN probe) and 3′ (3′ PolyA probe) positions of the knock-in cargo. Shown are results for four exemplary cell lines, two lines were classified as homozygous knock-in with targeted integration (TI) rates of 88.5% (clone 1) and 90.5% (clone 2) respectively, and two lines were classified as heterozygous knock-in with TI rates of 45.6% (clone 1) and 46.5% (clone 2) respectively.

[0461] FIG. 25A depicts exemplary flow cytometry data from day 32 of homozygous clone 1 CD16 knock-in iPSCs differentiation into iNKs. The data highlights the efficiency of integration and high expression (e.g., approximately 98%) of a knock-in cassette comprising a CD16 protein encoding “cargo” sequence, into the GAPDH gene of iPSCs. In addition, the data shows knock-in of a “cargo” at the GADPH gene does not inhibit the differentiation process, as represented by high CD56+CD45+ population proportions.

[0462] FIG. 25B depicts exemplary flow cytometry data from day 32 of homozygous clone 2 CD16 knock-in iPSCs differentiation into iNKs. The data highlights the efficiency of integration and expression of a knock-in cassette comprising a CD16 protein encoding “cargo” sequence, into the GAPDH gene of iPSCs.

[0463] FIG. 25C depicts exemplary flow cytometry data from day 32 of heterozygous clone 1 CD16 knock-in iPSCs differentiation into iNKs. The data highlights the efficiency of integration and high expression (e.g., approximately 97.8%) of a knock-in cassette comprising a CD16 protein encoding “cargo” sequence, into the GAPDH gene of iPSCs.

[0464] FIG. 25D depicts exemplary flow cytometry data from day 32 of heterozygous clone 2 CD16 knock-in iPSCs differentiation into iNKs. The data highlights the efficiency of integration and expression of a knock-in cassette comprising a CD16 protein encoding “cargo” sequence, into the GAPDH gene of iPSCs.

[0465] FIG. 26 is a schematic representation of an exemplary solid tumor cell killing assay, depicting the use of knock-in iPSCs differentiated into iNK cells to kill 3D spheroids created from a cancer cell line (e.g., SK-OV-3 ovarian cancer cells). Antibodies and/or cytokines may optionally be added during the 3D spheroid killing stage.

[0466] FIG. 27A shows the results of a solid tumor killing assay as described in FIG. 26. Homozygous clones comprising CD16 knock-in at the GAPDH gene were differentiated into iNK cells and functioned to reduce tumor cell spheroid size, particularly following the addition of an antibody, e.g., 10 μg/mL trastuzumab; addition of an antibody promotes antibody dependent cellular cytotoxicity (ADCC) and tumor cell killing by iNKs. Control “WT PCS” cells were bulk unedited parental clones that were electroporated without RNPs or plasmids, and at the same stage of iNK cell differentiation as test cells. The Y axis depicts normalized total integrated red object intensity, a proxy for tumor cell abundance, while the X axis depicts the Effector to Target cell (E:T) ratio.

[0467] FIG. 27B shows the results of a solid tumor killing assay as described in FIG. 26. Heterozygous clones comprising CD16 knock-in at the GAPDH gene were differentiated into iNK cells and functioned to reduce tumor cell spheroid size, particularly following the addition of an antibody, e.g., 10 μg/mL trastuzumab; addition of an antibody promotes ADCC and tumor cell killing by iNKs. Control “WT PCS” cells were bulk unedited parental clones that were electroporated without RNPs or plasmids, and at the same stage of iNK cell differentiation as test cells. The Y axis depicts normalized total integrated red object intensity, a proxy for tumor cell abundance, while the X axis depicts the E:T ratio.

[0468] FIG. 28 shows the results of an in-vitro serial killing assay, where homozygous or heterozygous clones comprising CD16 knock-in at the GAPDH gene were differentiated into iNK cells and were serially challenged with hematological cancer cells (e.g., Raji cells), with or without the addition of antibody 0.1 μg/mL rituximab. The X axis represents time (0-598 hr.) with an additional tumor cell bolus (5,000 cells) being added approximately every 48 hours, the Y axis represents killing efficacy as measured by normalized total red object area (e.g., presence of tumor cells). Star (*) denotes onset of addition of 0.1 μg/mL rituximab in previously rituximab absent trials. The data shows that edited iNK cells (CD16 knock-in at GAPDH gene; clones “Homo_C1”, “Homo_C2”, “Het_C1”, and “Het_C2”) continue to kill hematological cancer cells while unedited (“PCS”) or control edited iNKs (“GFP Bulk”) derived from parental iPSCs lose this function at equivalent time points.

[0469] FIG. 29 depicts a correlation (R² of 0.768) between CD16 expression and reduction in tumor spheroid size at an Effector to Target (E:T) ratio of 3.16:1. Shown are differentiated iNK cells derived from either iPSC bulk edited cells or iPSC individual clones with CD16 knock-in at the GAPDH gene. The Y axis represents normalized tumor cell killing values, while the X axis represents the percentage of a cell population expressing CD16.

[0470] FIG. 30A is a histogram depicting exemplary ddPCR data measured at day 9 post nucleofection of two different iPSC lines with plasmids and 2 μM RNPs comprising RSQ22337 targeting the GAPDH gene and Cas12a (SEQ ID NO: 62), for knock-in of CD16 cargo, a CAR cargo, or a biallelic GFP/mCherry cargo into the GAPDH gene.

[0471] FIG. 30B depicts exemplary flow cytometry data from iPSC lines edited with plasmids and 2 μM RNPs comprising RSQ22337 targeting the GAPDH gene and Cas12a (SEQ ID NO: 62), for knock-in of CXCR2 cargo into the GAPDH gene (GAPDH::CXCR2) or control iPSCs transformed with RNP only (Wild-type). CXCR2 expression is noted on the X axis, edited cells expressing CXCR2 was 29.2% of the bulk edited cell population, while surface expression of CXCR2 was 8.53% of the bulk edited cell populations.

[0472] FIG. 31 is a histogram depicting the knock-in efficiency of a series of knock-in cassette cargo sequences such as CD16-P2A-CAR, CD16-IRES-CAR, CAR-P2A-CD16, CAR-IRES-CD16, and mbIL-15 into the GAPDH gene using RNPs comprising RSQ22337 targeting the GAPDH gene and Cas12a (SEQ ID NO: 62), measured on day 0 post-electroporation measured using ddPCR targeting the 5′ (5′ CDN probe) and 3′ (3′ PolyA probe) positions of the knock-in “cargo”.

[0473] FIG. 32 diagrammatically depicts a membrane-bound IL15.IL15Rα (mbIL-15) construct that can be utilized as a knock-in cargo sequence as described herein.

[0474] FIG. 33 is a histogram depicting the TI of mbIL-15 into the GAPDH gene over time when measured as a percentage of a bulk edited population. Shown are TI rates from iPSCs that that are on day 28 of the differentiation to iNK cell process.

[0475] FIG. 34A depicts exemplary flow cytometry data from bulk edited mbIL-15 GAPDH gene knock-in iPSC populations at day 39 of differentiation into iNKs.

[0476] FIG. 34B depicts exemplary flow cytometry data from bulk edited mbIL-15 GAPDH gene knock-in iPSC populations at day 39 of differentiation into iNKs.

[0477] FIG. 34C shows surface expression phenotypes (measured as a percentage of the population) of bulk edited mbIL-15 GAPDH gene knock-in iPSC populations being differentiated into iNK cells as compared to parental clone cells also being differentiated into iNK cells (“WT”) at day 32, day 39, day 42, and day 49 of iPSC differentiation.

[0478] FIG. 35 shows the results from two in-vitro tumor cell killing assays. Two biological replicates of bulk edited iPSC populations (S1 and S2) comprising mbIL-15 knock-in at the GAPDH gene were differentiated into iNK cells (day 56 of differentiation for S2, and day 63 of differentiation for 51) and functioned to reduce hematological cancer cells (e.g., Raji cells) fluorescence signal when compared to WT parental cells also differentiated into iNK cells, measured in the absence or presence of 10 μg/mL rituximab, E:T ratios of 1 (A) or 2.5 (B); (experiments performed in duplicate, R1 and R2).

[0479] FIG. 36 shows the results of a solid tumor killing assay as described in FIG. 26. Two biological replicates of bulk edited iPSC populations (S1 and S2) comprising mbIL-15 knock-in at the GAPDH gene were differentiated into iNK cells (day 39 of iPSC differentiation) and functioned to reduce tumor cell spheroid size when compared to WT parental cells also differentiated into iNK cells. Addition of 5 ng/mL exogenous IL-15 increased tumor cell killing by iNKs. The Y axis depicts normalized total integrated red object intensity, a proxy for tumor cell abundance, while the X axis depicts E:T ratio.

[0480] FIG. 37A shows the results of solid tumor killing assays as described in FIG. 26. Two biological replicates of bulk edited iPSC populations (S1 and S2) comprising mbIL-15 knock-in at the GAPDH gene were differentiated into iNK cells (day 63 of iPSC differentiation for S1, and day 56 of iPSC differentiation for S2) and functioned to reduce tumor cell spheroid size. The Y axis represents killing efficacy as measured by normalized total red object area (e.g., presence of tumor cells), while the X axis represents the E:T cell ratio; experiments were performed in duplicate or triplicate, R1, R2, and R2.1.

[0481] FIG. 37B shows the results of solid tumor killing assays as described in 37A, but with the addition of 10 μg/mL Herceptin antibody, an addition that triggers ADCC tumor cell killing.

[0482] FIG. 37C shows the results of solid tumor killing assays as described in 37A, but with the addition of 5 ng/mL exogenous IL-15.

[0483] FIG. 37D shows the results of solid tumor killing assays as described in 37A, but with the addition of 5 ng/mL exogenous IL-15 and 10 μg/mL Herceptin antibody, an addition that triggers ADCC tumor cell killing.

[0484] FIG. 38 depicts the cumulative results of two independent sets of cells and 3-5 repeats of solid tumor killing assays as described in FIG. 26. Two independent bulk edited populations (S1 and S2) comprising mbIL-15 knock-in at the GAPDH gene were differentiated into iNK cells (day 39 and 49 of iPSC differentiation for set 1, and day 42 of iPSC differentiation for S2) and functioned to significantly reduce tumor cell spheroid size when compared to differentiated WT parental cell iNKs in the absence of exogenous IL-15 (P=0.034, +/−standard deviation, unpaired t-test); in addition, differentiated knock-in cells trended towards significant reduction of tumor cell spheroid size when compared to differentiated WT parental cells in the presence of 5 ng/mL exogenous IL-15 (P=0.052, +/−standard deviation, unpaired t-test).

[0485] FIG. 39A schematically depicts a knock-in cassette cargo sequence comprising membrane-bound IL15.IL15Rα (mbIL-15) coupled with a GFP sequence, for integration at a target gene as described herein.

[0486] FIG. 39B schematically depicts a knock-in cassette cargo sequence comprising CD16, IL15, and IL15Rα, for integration at a target gene as described herein.

[0487] FIG. 39C schematically depicts a knock-in cassette cargo sequence comprising CD16 and membrane bound IL15.IL15Rα (mbIL-15), for integration at a target gene as described herein.

[0488] FIG. 40A depicts exemplary flow cytometry data from bulk edited iPSC populations seven days after transformation with PLA1829 (see FIG. 39A) comprising a cargo sequence of membrane-bound IL15.IL15Rα (mbIL-15) coupled with a GFP sequence inserted in the GAPDH gene using RNPs comprising RSQ22337 targeting the GAPDH gene and Cas12a (SEQ ID NO: 62), or control WT cells transformed with RNPs only, measured using ddPCR. Shown on the Y axis is IL-15Rα expression, while GFP expression is shown on the X axis.

[0489] FIG. 40B depicts exemplary flow cytometry data from bulk edited iPSC populations seven days after transformation with PLA1832 or PLA1834 (see FIGS. 39B and 39C), comprising a cargo sequence of CD16, IL-15, and IL15Rα, or comprising a cargo sequence of CD16 and membrane-bound IL15.IL15Rα (mbIL-15); inserted in the GAPDH gene using RNPs comprising RSQ22337 targeting the GAPDH gene and Cas12a (SEQ ID NO: 62), measured using ddPCR. Shown on the Y axis is IL-15Rα expression, X axis is GFP expression.

[0490] FIG. 41A is a histogram depicting the genotypes of individual colonies following transformation as described in FIG. 40A with PLA1829 (5 μg) and 2 μM RNPs comprising RSQ22337 targeting the GAPDH gene and Cas12a (SEQ ID NO: 62), measured using ddPCR. Shown are individual homozygous (˜100% TI), heterozygous (˜50% TI), or wild type (˜0% TI) cells.

[0491] FIG. 41B is a histogram depicting the genotypes of individual colonies following transformation as described in FIG. 40B with PLA1832 (5 μg) and 2 μM RNPs comprising RSQ22337 targeting the GAPDH gene and Cas12a (SEQ ID NO: 62), measured using ddPCR. Shown are individual homozygous (˜100% TI), heterozygous (˜50% TI), or wild type (˜0% TI) cells.

[0492] FIG. 41C is a histogram depicting the genotypes of individual colonies following transformation as described in FIG. 40B with PLA1834 (5 μg) and 2 μM RNPs comprising RSQ22337 targeting the GAPDH gene and Cas12a (SEQ ID NO: 62), measured using ddPCR. Shown are individual homozygous (˜100% TI), heterozygous (˜50% TI), or wild type (˜0% TI) cells.

[0493] FIG. 42A depicts exemplary flow cytometry data from cells comprising knock-in cargo sequences from PLA1829, PLA1832, or PLA1834 at the GAPDH gene (as described in FIG. 40A-40C) measured at day 32 of differentiation into iNKs; “WT” cells were transformed with RNPs only and were also at day 32 of differentiation into iNKs. The data highlights the efficiency of integration and expression of knock-in cassettes comprising an IL-15Rα protein encoding “cargo” sequence. The Y axis quantifies the percentage of cells from the noted population that are expressing IL-15Rα, while the X axis denotes colony genotype.

[0494] FIG. 42B depicts exemplary flow cytometry data from cells comprising knock-in cargo sequences from PLA1829, PLA1832, or PLA1834 at the GAPDH gene (as described in FIG. 40A-40C) measured at day 32 of differentiation into iNKs; “WT” cells were transformed with RNPs only and were also at day 32 of differentiation into iNKs. The data highlights the efficiency of integration and expression of knock-in cassettes comprising a CD16 protein encoding “cargo” sequence. The Y axis quantifies the percentage of cells from the noted population that are expressing CD16, while the X axis denotes colony genotype.

[0495] FIG. 42C depicts exemplary flow cytometry data from cells comprising knock-in cargo sequences from PLA1829, PLA1832, or PLA1834 at the GAPDH gene (as described in FIG. 40A-40C) measured at day 32 of differentiation into iNKs; “WT” cells were transformed with RNPs only and were also at day 32 of differentiation into iNKs. The data highlights the efficiency of integration and expression of knock-in cassettes comprising an IL-15Rα protein encoding “cargo” sequence. The Y axis quantifies the median fluorescence intensity (MFI) of a cell population expressing IL-15Rα, while the X axis denotes colony genotype.

[0496] FIG. 42D depicts exemplary flow cytometry data from cells comprising knock-in cargo sequences from PLA1829, PLA1832, or PLA1834 at the GAPDH gene (as described in FIG. 40A-40C) measured at day 32 of differentiation into iNKs; “WT” cells were transformed with RNPs only and were also at day 32 of differentiation into iNKs. The data highlights the efficiency of integration and expression of knock-in cassettes comprising a CD16 protein encoding “cargo” sequence. The Y axis quantifies the median fluorescence intensity (MFI) of a cell population expressing CD16, while the X axis denotes colony genotype.

[0497] FIG. 43A is a panel of cytometric dot plots showing further enrichment of PSCs that have been edited for a PDL1-based transgene, edited for a CD47-based transgene, or biallelically edited for a PDL1-based transgene and a CD47-based transgene targeted to the GAPDH gene locus, following a second round of editing with ribonucleoprotein (“RNP”) and PDL1-based and CD47-based donor constructs or RNP alone.

[0498] FIG. 43B is a panel of cytometric dot plots showing further enrichment of PSCs that have been edited for a PDL1-based transgene targeted to the GAPDH gene, following a second round of editing with RNP alone.

[0499] FIG. 44 depicts two cytometric dot plots showing unedited PSCs or enrichment of PSCs that have been edited at the GAPDH locus using two different donor templates, one of which is PDL1-based and the other is CD47-based. When editing using two different donor constructs, cells can be observed that are edited with either one unique donor construct (either PDL1-based or CD47-based) or biallelically edited for both a PDL1-based transgene and a CD47-based transgene targeted to the GAPDH gene.

### DETAILED DESCRIPTION

### Definitions and Abbreviations

[0500] Unless otherwise specified, each of the following terms have the meaning set forth in this section.

[0501] The indefinite articles “a” and “an” refer to at least one of the associated noun, and are used interchangeably with the terms “at least one” and “one or more.” The conjunctions “or” and “and/or” are used interchangeably as non-exclusive disjunctions.

[0502] The term “cancer” (also used interchangeably with the term “neoplastic”), as used herein, refers to cells having the capacity for autonomous growth, i.e., an abnormal state or condition characterized by rapidly proliferating cell growth. Cancerous disease states may be categorized as pathologic, i.e., characterizing or constituting a disease state, e.g., malignant tumor growth, or may be categorized as non-pathologic, i.e., a deviation from normal but not associated with a disease state, e.g., cell proliferation associated with wound repair.

[0503] The terms “CRISPR/Cas nuclease” as used herein refer to any CRISPR/Cas protein with DNA nuclease activity, e.g., a Cas9 or a Cas12 protein that exhibits specific association (or “targeting”) to a DNA target site, e.g., within a genomic sequence in a cell in the presence of a guide molecule. The strategies, systems, and methods disclosed herein can use any combination of CRISPR/Cas nuclease disclosed herein, or known to those of ordinary skill in the art. Those of ordinary skill in the art will be aware of additional CRISPR/Cas nucleases and variants suitable for use in the context of the present disclosure, and it will be understood that the present disclosure is not limited in this respect.

[0504] The term “differentiation” as used herein is the process by which an unspecialized (“uncommitted”) or less specialized cell acquires the features of a specialized cell such as, for example, a blood cell. In some embodiments, a differentiated or differentiation-induced cell is one that has taken on a more specialized (“committed”) position within the lineage of a cell. For example, an iPS cell (iPSC) can be differentiated into various more differentiated cell types, for example, a hematopoietic stem cell, a lymphocyte, and other cell types, upon treatment with suitable differentiation factors in the cell culture medium. Suitable methods, differentiation factors, and cell culture media for the differentiation of pluri- and multipotent cell types into more differentiated cell types are well known to those of skill in the art. In some embodiments, the term “committed”, is applied to the process of differentiation to refer to a cell that has proceeded through a differentiation pathway to a point where, under normal circumstances, it would or will continue to differentiate into a specific cell type or subset of cell types, and cannot, under normal circumstances, differentiate into a different cell type (other than a specific cell type or subset of cell types) nor revert to a less differentiated cell type.

[0505] The terms “differentiation marker,” “differentiation marker gene,” or “differentiation gene,” as used herein refers to genes or proteins whose expression are indicative of cell differentiation occurring within a cell, such as a pluripotent cell. In some embodiments, differentiation marker genes include, but are not limited to, the following genes: CD34, CD4, CD8, CD3, CD56 (NCAM), CD49, CD45, NK cell receptor (cluster of differentiation 16 (CD16)), natural killer group-2 member D (NKG2D), CD69, NKp30, NKp44, NKp46, CD158b, FOXA2, FGF5, SOX17, XIST, NODAL, COL3A1, OTX2, DUSP6, EOMES, NR2F2, NROB1, CXCR4, CYP2B6, GAT A3, GATA4, ERBB4, GATA6, HOXC6, INHA, SMAD6, RORA, NIPBL, TNFSF11, CDH11, ZIC4, GAL, SOX3, PITX2, APOA2, CXCL5, CER1, FOXQ1, MLL5, DPP10, GSC, PCDH10, CTCFL, PCDH20, TSHZ1, MEGF10, MYC, DKK1, BMP2, LEFTY2, HES1, CDX2, GNAS, EGR1, COL3A1, TCF4, HEPH, KDR, TOX, FOXA1, LCK, PCDH7, CD1D FOXG1, LEFTY1, TUJ1, T gene (Brachyury), ZIC1, GATA1, GATA2, HDAC4, HDAC5, HDAC7, HDAC9, NOTCH1, NOTCH2, NOTCH4, PAX5, RBPJ, RUNX1, STAT1 and STAT3.

[0506] The terms “differentiation marker gene profile,” or “differentiation gene profile,” “differentiation gene expression profile,” “differentiation gene expression signature,” “differentiation gene expression panel,” “differentiation gene panel,” or “differentiation gene signature” as used herein refer to expression or levels of expression of a plurality of differentiation marker genes.

[0507] The term “nuclease” as used herein refers to any protein that catalyzes the cleavage of phosphodiester bonds. In some embodiments the nuclease is a DNA nuclease. In some embodiments the nuclease is a “nickase” which causes a single-strand break when it cleaves double-stranded DNA, e.g., genomic DNA in a cell. In some embodiments the nuclease causes a double-strand break when it cleaves double-stranded DNA, e.g., genomic DNA in a cell. In some embodiments the nuclease binds a specific target site within the double-stranded DNA that overlaps with or is adjacent to the location of the resulting break. In some embodiments, the nuclease causes a double-strand break that contains overhangs ranging from 0 (blunt ends) to 22 nucleotides in both 3′ and 5′ orientations. As discussed herein, CRISPR/Cas nucleases, zinc finger nucleases (ZFNs), transcription activator-like effector nucleases (TALENs) and meganucleases are exemplary nucleases that can be used in accordance with the strategies, systems, and methods of the present disclosure.

[0508] The term “embryonic stem cell” as used herein refers to pluripotent stem cells derived from the inner cell mass of the embryonic blastocyst. In some embodiments, embryonic stem cells are pluripotent and give rise during development to all derivatives of the three primary germ layers: ectoderm, endoderm and mesoderm. In some such embodiments, embryonic stem cells do not contribute to the extra-embryonic membranes or the placenta, i.e., are not totipotent.

[0509] The term “endogenous,” as used herein in the context of nucleic acids refers to a native nucleic acid (e.g., a gene, a protein coding sequence) in its natural location, e.g., within the genome of a cell.

[0510] The term “essential gene” as used herein with respect to a cell refers to a gene that encodes at least one gene product that is required for survival and/or proliferation of the cell. An essential gene can be a housekeeping gene that is essential for survival of all cell types or a gene that is required to be expressed in a specific cell type for survival and/or proliferation under particular culture conditions, e.g., for proper differentiation of iPS or ES cells or expansion of iPS- or ES-derived cells. Loss of function of an essential gene results, in some embodiments, in a significant reduction of cell survival, e.g., of the time a cell characterized by a loss of function of an essential gene survives as compared to a cell of the same cell type but without a loss of function of the same essential gene. In some embodiments, loss of function of an essential gene results in the death of the affected cell. In some embodiments, loss of function of an essential gene results in a significant reduction of cell proliferation, e.g., in the ability of a cell to divide, which can manifest in a significant time period the cell requires to complete a cell cycle, or, in some preferred embodiments, in a loss of a cell's ability to complete a cell cycle, and thus to proliferate at all.

[0511] The term “exogenous,” as used herein in the context of nucleic acids refers to a nucleic acid (whether native or non-native) that has been artificially introduced into a man-made construct (e.g., a knock-in cassette, or a donor template) or into the genome of a cell using, for example, gene editing or genetic engineering techniques, e.g., HDR based integration techniques.

[0512] The term “guide molecule” or “guide RNA” or “gRNA” when used in reference to a CRISPR/Cas system is any nucleic acid that promotes the specific association (or “targeting”) of a CRISPR/Cas nuclease, e.g., a Cas9 or a Cas12 protein to a DNA target site such as within a genomic sequence in a cell. While guide molecules are typically RNA molecules it is well known in the art that chemically modified RNA molecules including DNA/RNA hybrid molecules can be used as guide molecules.

[0513] The terms “hematopoietic stem cell,” or “definitive hematopoietic stem cell” as used herein, refer to CD34-positive (CD34+) stem cells. In some embodiments, CD34-positive stem cells are capable of giving rise to mature myeloid and/or lymphoid cell types. In some embodiments, the myeloid and/or lymphoid cell types include, for example, T cells, natural killer (NK) cells and/or B cells.

[0514] The terms “induced pluripotent stem cell”, “iPS cell” or “iPSC” as used herein to refer to a stem cell obtained from a differentiated somatic (e.g., adult, neonatal, or fetal) cell by a process referred to as reprogramming (e.g., dedifferentiation). In some embodiments, reprogrammed cells are capable of differentiating into tissues of all three germ or dermal layers: mesoderm, endoderm, and ectoderm. iPSCs are not found in nature.

[0515] The terms “iPS-derived NK cell” or “iNK cell” or as used herein refers to a natural killer cell which has been produced by differentiating an iPS cell, which iPS cell may or may not have a genetic modification.

[0516] The terms “iPS-derived T cell” or “iT cell” or as used herein refers to a T which has been produced by differentiating an iPS cell, which iPS cell may or may not have a genetic modification.

[0517] The term “multipotent stem cell” as used herein refers to a cell that has the developmental potential to differentiate into cells of one or more germ layers (ectoderm, mesoderm and endoderm), but not all three germ layers. Thus, in some embodiments, a multipotent cell may also be termed a “partially differentiated cell.” Multipotent cells are well-known in the art, and examples of multipotent cells include adult stem cells, such as for example, hematopoietic stem cells and neural stem cells. In some embodiments, “multipotent” indicates that a cell may form many types of cells in a given lineage, but not cells of other lineages. For example, a multipotent hematopoietic cell can form the many different types of blood cells (red, white, platelets, etc.), but it cannot form neurons. Accordingly, in some embodiments, “multipotency” refers to a state of a cell with a degree of developmental potential that is less than totipotent and pluripotent.

[0518] The term “pluripotent” as used herein refers to ability of a cell to form all lineages of the body or soma (i.e., the embryo proper) or a given organism (e.g., human). For example, embryonic stem cells are a type of pluripotent stem cells that are able to form cells from each of the three germs layers, the ectoderm, the mesoderm, and the endoderm. Generally, pluripotency may be described as a continuum of developmental potencies ranging from an incompletely or partially pluripotent cell (e.g., an epiblast stem cell or EpiSC), which is unable to give rise to a complete organism to the more primitive, more pluripotent cell, which is able to give rise to a complete organism (e.g., an embryonic stem cell or an induced pluripotent stem cell).

[0519] The term “pluripotency” as used herein refers to a cell that has the developmental potential to differentiate into cells of all three germ layers (ectoderm, mesoderm, and endoderm). In some embodiments, pluripotency can be determined, in part, by assessing pluripotency characteristics of the cells. In some embodiments, pluripotency characteristics include, but are not limited to: (i) pluripotent stem cell morphology; (ii) the potential for unlimited self-renewal; (iii) expression of pluripotent stem cell markers including, but not limited to SSEA1 (mouse only), SSEA3/4, SSEA5, TRA1-60/81, TRA1-85, TRA2-54, GCTM-2, TG343, TG30, CD9, CD29, CD133/prominin, CD140a, CD56, CD73, CD90, CD105, OCT4 (also known as POU5F1), NANOG, SOX2, CD30 and/or CD50; (iv) ability to differentiate to all three somatic lineages (ectoderm, mesoderm and endoderm); (v) teratoma formation consisting of the three somatic lineages; and (vi) formation of embryoid bodies consisting of cells from the three somatic lineages.

[0520] The term “pluripotent stem cell morphology” as used herein refers to the classical morphological features of an embryonic stem cell. In some embodiments, normal embryonic stem cell morphology is characterized as small and round in shape, with a high nucleus-to-cytoplasm ratio, the notable presence of nucleoli, and typical intercell spacing.

[0521] The term “polycistronic” or “multicistronic” when used herein with reference to a knock-in cassette refers to the fact that the knock-in cassette can express two or more proteins from the same mRNA transcript. Similarly, a “bicistronic” knock-in cassette is a knock-in cassette that can express two proteins from the same mRNA transcript.

[0522] The term “polynucleotide” (including, but not limited to “nucleotide sequence”, “nucleic acid”, “nucleic acid molecule”, “nucleic acid sequence”, and “oligonucleotide”) as used herein refer to a series of nucleotide bases (also called “nucleotides”) in DNA and RNA, and mean any chain of two or more nucleotides. In some embodiments, polynucleotides, nucleotide sequences, nucleic acids, etc. can be chimeric mixtures or derivatives or modified versions thereof, single-stranded or double-stranded. In some such embodiments, modifications can occur at the base moiety, sugar moiety, or phosphate backbone, for example, to improve stability of the molecule, its hybridization parameters, etc. In general, a nucleotide sequence typically carries genetic information, including, but not limited to, the information used by cellular machinery to make proteins and enzymes. In some embodiments, a nucleotide sequence and/or genetic information comprises double- or single-stranded genomic DNA, RNA, any synthetic and genetically manipulated polynucleotide, and/or sense and/or antisense polynucleotides. In some embodiments, nucleic acids containing modified bases.

[0523] Conventional IUPAC notation is used in nucleotide sequences presented herein, as shown in Table 1, below (see also Cornish-Bowden, Nucleic Acids Res. 1985; 13(9):3021-30, incorporated by reference herein). It should be noted, however, that “T” denotes “Thymine or Uracil” in those instances where a sequence may be encoded by either DNA or RNA, for example in certain CRISPR/Cas guide molecule targeting domains.

TABLE 1
IUPAC nucleic acid notation

| Character | Base |
|---|---|
| A | Adenine |
| T | Thymine or Uracil |
| G | Guanine |
| C | Cytosine |
| U | Uracil |
| K | G or T/U |
| M | A or C |
| R | A or G |
| Y | C or T/U |
| S | C or G |
| W | A or T/U |
| B | C, G or T/U |
| V | A, C or G |
| H | A, C or T/U |
| D | A, G or T/U |
| N | A, C, G or T/U |

[0524] The terms “potency” or “developmental potency” as used herein refer to the sum of all developmental options accessible to the cell (i.e., the developmental potency), particularly, for example in the context of cellular developmental potential. In some embodiments, the continuum of cell potency includes, but is not limited to, totipotent cells, pluripotent cells, multipotent cells, oligopotent cells, unipotent cells, and terminally differentiated cells.

[0525] The terms “prevent,” “preventing,” and “prevention” as used herein refer to the prevention of a disease in a mammal, e.g., in a human, including (a) avoiding or precluding the disease; (b) affecting the predisposition toward the disease; or (c) preventing or delaying the onset of at least one symptom of the disease.

[0526] The terms “protein,” “peptide” and “polypeptide” as used herein are used interchangeably to refer to a sequential chain of amino acids linked together via peptide bonds. The terms include individual proteins, groups or complexes of proteins that associate together, as well as fragments or portions, variants, derivatives and analogs of such proteins. Unless otherwise specified, peptide sequences are presented herein using conventional notation, beginning with the amino or N-terminus on the left, and proceeding to the carboxyl or C-terminus on the right. Standard one-letter or three-letter abbreviations can be used.

[0527] The term “gene product of interest” as used herein can refer to any product encoded by a gene including any polynucleotide or polypeptide. In some embodiments the gene product is a protein which is not naturally expressed by a target cell of the present disclosure. In some embodiments the gene product is a protein which confers a new therapeutic activity to the cell such as, but not limited to, a chimeric antigen receptor (CAR) or antigen-binding fragment thereof, a T cell receptor or antigen-binding portion thereof, a non-naturally occurring variant of FcγRIII (CD16), interleukin 15 (IL-15), interleukin 15 receptor (IL-15R) or a variant thereof, interleukin 12 (IL-12), interleukin-12 receptor (IL-12R) or a variant thereof, human leukocyte antigen G (HLA-G), human leukocyte antigen E (HLA-E), leukocyte surface antigen cluster of differentiation CD47 (CD47), or any combination of two or more thereof. It is to be understood that the methods and cells of the present disclosure are not limited to any particular gene product of interest and that the selection of a gene product of interest will depend on the type of cell and ultimate use of the cells.

[0528] The term “reporter gene” as used herein refers to an exogenous gene that has been introduced into a cell, e.g., integrated into the genome of the cell, that confers a trait suitable for artificial selection. Common reporter genes are fluorescent reporter genes that encode a fluorescent protein, e.g., green fluorescent protein (GFP) and antibiotic resistance genes that confer antibiotic resistance to cells.

[0529] The terms “reprogramming” or “dedifferentiation” or “increasing cell potency” or “increasing developmental potency” as used herein refer to a method of increasing potency of a cell or dedifferentiating a cell to a less differentiated state. For example, in some embodiments, a cell that has an increased cell potency has more developmental plasticity (i.e., can differentiate into more cell types) compared to the same cell in the non-reprogrammed state. That is, in some embodiments, a reprogrammed cell is one that is in a less differentiated state than the same cell in a non-reprogrammed state. In some embodiments, “reprogramming” refers to de-differentiating a somatic cell, or a multipotent stem cell, into a pluripotent stem cell, also referred to as an induced pluripotent stem cell, or iPSC. Suitable methods for the generation of iPSCs from somatic or multipotent stem cells are well known to those of skill in the art.

[0530] The term “subject” as used herein means a human or non-human animal. In some embodiments a human subject can be any age (e.g., a fetus, infant, child, young adult, or adult). In some embodiments a human subject may be at risk of or suffer from a disease, or may be in need of alteration of a gene or a combination of specific genes. Alternatively, in some embodiments, a subject may be a non-human animal, which may include, but is not limited to, a mammal. In some embodiments, a non-human animal is a non-human primate, a rodent (e.g., a mouse, rat, hamster, guinea pig, etc.), a rabbit, a dog, a cat, and so on. In certain embodiments of this disclosure, the non-human animal subject is livestock, e.g., a cow, a horse, a sheep, a goat, etc. In certain embodiments, the non-human animal subject is poultry, e.g., a chicken, a turkey, a duck, etc.

[0531] The terms “treatment,” “treat,” and “treating,” as used herein refer to a clinical intervention aimed to reverse, alleviate, delay the onset of, or inhibit the progress, ameliorate, reduce severity of, prevent or delay the recurrence of a disease, disorder, or condition or one or more symptoms thereof, and/or improve one or more symptoms of a disease, disorder, or condition as described herein. In some embodiments, a condition includes an injury. In some embodiments, an injury may be acute or chronic (e.g., tissue damage from an underlying disease or disorder that causes, e.g., secondary damage such as tissue injury). In some embodiments, treatment, e.g., in the form of an iPSC-derived NK cell or a population of iPSC-derived NK cells as described herein, may be administered to a subject after one or more symptoms have developed and/or after a disease has been diagnosed. Treatment may be administered in the absence of symptoms, e.g., to prevent or delay onset of a symptom or inhibit onset or progression of a disease. For example, in some embodiments, treatment may be administered to a susceptible subject prior to the onset of symptoms (e.g., in light of genetic or other susceptibility factors). In some embodiments, treatment may also be continued after symptoms have resolved, for example to prevent or delay their recurrence. In some embodiments, treatment results in improvement and/or resolution of one or more symptoms of a disease, disorder or condition.

[0532] The term “variant” as used herein refers to an entity such as a polypeptide or polynucleotide that shows significant structural identity with a reference entity but differs structurally from the reference entity in the presence or level of one or more chemical moieties as compared with the reference entity. In many embodiments, a variant also differs functionally from its reference entity. In general, whether a particular entity is properly considered to be a “variant” of a reference entity is based on its degree of structural identity with the reference entity. As used herein, the terms “functional variant” refer to a variant that confers the same function as the reference entity, e.g., a functional variant of a gene product of an essential gene is a variant that promotes the survival and/or proliferation of a cell. It is to be understood that a functional variant need not be functionally equivalent to the reference entity as long as it confers the same function as the reference entity.

### Methods of Editing the Genome of a Cell

[0533] In one aspect, the present disclosure provides methods of editing the genome of a cell. In certain embodiments, the method comprises contacting the cell with a nuclease that causes a break within an endogenous coding sequence of an essential gene in the cell wherein the essential gene encodes at least one gene product that is required for survival and/or proliferation of the cell. The cell is also contacted with (i) a donor template that comprises a knock-in cassette comprising an exogenous coding sequence for a gene product of interest in frame with and downstream (3′) of an exogenous coding sequence or partial coding sequence of the essential gene and/or (ii) a donor template that comprises a knock-in cassette comprising an exogenous coding sequence for a gene product of interest in frame with and upstream (5′) of an exogenous coding sequence or partial coding sequence of the essential gene (FIG. 3D). The knock-in cassette is integrated into the genome of the cell by homology-directed repair (HDR) of the break, resulting in a genome-edited cell that expresses the gene product of interest and the gene product encoded by the essential gene that is required for survival and/or proliferation of the cell, or a functional variant thereof. The genetically modified “knock-in” cell survives and proliferates to produce progeny cells with genomes that also include the exogenous coding sequence for the gene product of interest. This is illustrated in FIG. 3A for an exemplary method.

[0534] If the knock-in cassette is not properly integrated into the genome of the cell, undesired editing events that result from the break, e.g., NHEJ-mediated creation of indels, may produce a non-functional, e.g., out of frame, version of the essential gene. This produces a “knock-out” cell when the editing efficiency of the nuclease is high enough to disrupt both alleles. In certain embodiments, this produces a “knock-out” cell when the editing efficiency of the nuclease is high enough to disrupt one allele. Without sufficient functional copies of the essential gene these “knock-out” cells are unable to survive and do not produce any progeny cells.

[0535] Since the “knock-in” cells survive and the “knock-out” cells do not survive, the method automatically selects for the “knock-in” cells when it is applied to a population of starting cells. Significantly, in certain embodiments, the method does not require high knock-in efficiencies because of this automatic selection aspect. It is therefore particularly suitable for methods where the donor template is a dsDNA (e.g., a plasmid) where knock-in efficiencies are often below 5%. As noted in the exemplary method of FIG. 3C, in some embodiments some of the cells in the population of starting cells may remain unedited, i.e., unaffected by the nuclease. These cells would also survive and produce progeny with genomes that do not include the exogenous coding sequence for the gene product of interest. When the nuclease editing efficiency is high, e.g., about 60-90%, or higher the percentage of unedited cells will be relatively low as compared to the percentage of genetically modified cells. In some embodiments, high nuclease editing efficiencies (e.g., greater than 65%, greater than 70%, greater than 75%, greater than 80%, greater than 85%, greater than 90%, or greater than 95%) facilitates efficient population wide transgene integration, as the percentage of unedited cells will be relatively low as compared to the percentage of genetically modified cells. In some embodiments of the methods disclosed herein, at least about 65% of the cells (e.g., about 70%, about 75%, about 80%, about 85%, about 90%, about 91%, about 92%, about 93%, about 94%, about 95%, about 96%, about 97%, about 98%, or about 99% of the cells) are edited by a nuclease, e.g., an Cas12a or Cas9. In some embodiments, an RNP containing a CRISPR nuclease (e.g., Cas9 or Cas12a) and a guide are capable of cleaving the locus of an essential gene (e.g., a terminal exon in the locus of any essential gene provided in Table 3) in at least 65% of the cells in a population of cells (e.g., at least 65%, at least 70%, at least 75%, at least 80%, at least 85%, at least 90%, at least 91%, at least 92%, at least 93%, at least 94%, at least 95%, at least 96%, at least 97%, at least 98%, or at least 99% of the cells in a population of cells). In some embodiments, editing efficiency is determined prior to target cell die off, e.g., at day 1 and/or day 2 post transfection or transduction. In some embodiments, editing efficiency measured at day 1 and/or day 2 post transfection or transduction may not capture the complete proportion of cells for which editing occurred, as in some embodiments, certain editing events may result in near immediate and/or swift cell death. In some embodiments, near immediate and/or swift cell death may be any period of time less than 48 hours post transfection or transduction, for example, less than 48 hours, less than 44 hours, less than 40 hours, less than 36 hours, less than 32 hours, less than 28 hours, less than 24 hours, less than 20 hours, less than 16 hours, less than 15 hours, less than 14 hours, less than 13 hours, less than 12 hours, less than 11 hours, less than 10 hours, less than 9 hours, less than 8 hours, less than 7 hours, less than 6 hours, less than 5 hours, less than 4 hours, less than 3 hours, less than 2 hours, or less than 1 hour after transfection or transduction.

[0536] In some embodiments, the nuclease causes a double-strand break. In some embodiments the nuclease causes a single-strand break, e.g., in some embodiments the nuclease is a nickase. In some embodiments the nuclease is a prime editor which comprises a nickase domain fused to a reverse transcriptase domain. In some embodiments the nuclease is an RNA-guided prime editor and the gRNA comprises the donor template. In some embodiments a dual-nickase system is used which causes a double-strand break via two single-strand breaks on opposing strands of a double-stranded DNA, e.g., genomic DNA of the cell.

[0537] In some embodiments, the present disclosure provides methods suitable for high-efficiency knock-in (e.g., a high proportion of a cell population comprises a knock-in allele), overcoming a major manufacturing challenge. Historically, gene of interest knock-in using plasmid vectors results in efficiencies typically between 0.1 and 5% (see e.g., Zhu et al., CRISPR/Cas-Mediated Selection-free Knockin Strategy in Human Embryonic Stem Cells. Stem Cell Reports. 2015; 4(6):1103-1111), this low knock-in efficiency can result in a need for extensive time and resources devoted to screening potentially edited clones.

[0538] In some embodiments, a gene of interest knocked into a cell may have a role in effector function, specificity, stealth, persistence, homing/chemotaxis, and/or resistance to certain chemicals (see for example, Saetersmoen et al., Seminars in Immunopathology, 2019).

[0539] In certain embodiments, the present disclosure provides methods for creation of knock-in cells that maintain high levels of expression regardless of age, differentiation status, and/or exogenous conditions. For example, in some embodiments, an integrated cargo is expressed at an optimal level with a desired subcellular localization as a function of an insertion site. In some embodiments, the present disclosure provides such cells.

### Systems for Editing the Genome of a Cell

[0540] In one aspect the present disclosure provides systems for editing the genome of a cell. In some embodiments, the system comprises the cell, a nuclease that causes a break within an endogenous coding sequence of an essential gene of the cell, wherein the essential gene encodes a gene product that is required for survival and/or proliferation of the cell, and a donor template that comprises a knock-in cassette comprising an exogenous coding sequence for a gene product of interest in frame with and downstream (3′) of an exogenous coding sequence or partial coding sequence of the essential gene.

[0541] In some embodiments, the nuclease causes a double-strand break. In some embodiments the nuclease causes a single-strand break, e.g., in some embodiments the nuclease is a nickase. In some embodiments the nuclease is a prime editor which comprises a nickase domain fused to a reverse transcriptase domain. In some embodiments the nuclease is an RNA-guided prime editor and the gRNA comprises the donor template. In some embodiments a dual-nickase system is used which causes a double-strand break via two single-strand breaks on opposing strand of a double-stranded DNA, e.g., genomic DNA of the cell.

[0542] Genome editing systems can be implemented (e.g., administered or delivered to a cell or a subject) in a variety of ways, and different implementations may be suitable for distinct applications. For instance, a genome editing system is implemented, in certain embodiments, as a protein/RNA complex (a ribonucleoprotein, or RNP). In certain embodiments, a genome editing system is implemented as one or more nucleic acids encoding an RNA-guided nuclease and guide RNA components described herein (optionally with one or more additional components); in certain embodiments, a genome editing system is implemented as one or more vectors comprising such nucleic acids, for instance a viral vector such as an adeno-associated virus; and in certain embodiments, a genome editing system is implemented as a combination of any of the foregoing. Additional or modified implementations that operate according to the principles set forth herein will be apparent to the skilled artisan and are within the scope of this disclosure.

[0543] In some embodiments, methods as described herein include performing certain steps in at least duplicate. For example, in some embodiments, integration of certain gene products of interest, particularly including multiple genes of interest or a large number of exogenous gene sequences, may result in an initial selection round that results in a lower than desired level of targeted integration. In certain embodiments, a lower than desirable levels of nuclease activity and/or of knock-in cassette targeted integration may result in a lower than desirable percentage of surviving cells and/or cells comprising the knock-in cassette; this may make identifying a cell with the genetic payload difficult. In some embodiments, to further enrich for the population of edited cells, cells were optionally expanded and then re-edited by providing the pool of edited cells with either both RNP and donor templates (e.g., one or more RNP particles targeting one or more loci, and one or more donor templates designed for targeted integration at one or more loci), or just RNP alone (e.g., one or more RNP that utilize residual donor template).

[0544] In some embodiments, where multiple rounds of RNP and/or donor template editing is performed, enrichment is affected by: i) removing cells that have not incorporated the genetic payload and/or ii) creating more cells with incorporated knock-in cassette. In some embodiments, the effectiveness of an additional enrichment steps, depending on the cargo, depending on whether multiple constructs are used, the target within the essential gene, or other factors, can lead to at least about two-fold, three-fold, four-fold, five-fold, or higher improvement in the percentage of cells incorporating the knock-in cassette from the donor template. In some embodiments, such enrichment can lead to uptake of the “cargo” within the essential gene of mammalian cells of greater than 1%, 2%, 3%, 4%, 5%, 6%, 7%, 8%, 9%, 10%, 15%, 20%, 25%, 30%, 35%, 40%, 45%, 50%, 55%, 60%, 65%, 70%, 75%, 80%, 85%, 90%, or greater than 95%.

[0545] In some embodiments, donor templates (e.g., donor nucleic acid constructs) comprise the transgene flanked by a first homologous region (HR) e.g., a homology arm, and a second HR, e.g., a second homology arm, designed to anneal to a first genomic region (GR) and a second GR within an essential gene of a cell. To be able to anneal, the HRs and GRs need not be perfectly homologous. In some embodiments, examples include a non-inhibitory small number (less than 6 and as few as 1) of mutations in the PAM 5′ of the transgene in the knock-in cassette. In some embodiments, other non-inhibitory changes include codon optimization, wherein unnecessary nucleotides in the wildtype exon are removed from the nucleotide sequence in the knock-in cassette. In some embodiments, other such silent PAM blocking mutations or a codon modifications that prevents cleavage of the donor nucleic acid construct by the nuclease are further contemplated. In some embodiments, at least about 90% homology is sufficient for functional annealing for purposes of the examples herein. In some embodiments, the level of homology between the HR and GR is more than 90%, more than 92%, more than 94%, more than 96%, more than 98%, or more than 99%. Other embodiments and the concepts set forth in this paragraph are contemplated and subsumed in the term “essentially homologous.”

### Genetically Modified Cells

[0546] In one aspect the present disclosure provides genetically modified cells or engineered cells including populations of such cells and progeny of such cells.

[0547] In some embodiments, the cell is produced by a method of the present disclosure, e.g., a method that comprises contacting the cell with a nuclease that causes a break within an endogenous coding sequence of an essential gene in the cell wherein the essential gene encodes at least one gene product that is required for survival and/or proliferation of the cell. The cell is also contacted with a donor template that comprises a knock-in cassette comprising an exogenous coding sequence for a gene product of interest in frame with and downstream (3′) of an exogenous coding sequence or partial coding sequence of the essential gene. The knock-in cassette is integrated into the genome of the cell by homology-directed repair (HDR) of the break, resulting in a genome-edited cell that expresses the gene product of interest and the gene product encoded by the essential gene that is required for survival and/or proliferation of the cell, or a functional variant thereof. This is illustrated in FIG. 3 for an exemplary method. In some embodiments, a cell is contacted with a donor template that comprises a knock-in cassette comprising an exogenous coding sequence for a gene product of interest in frame with and upstream (5′) of an exogenous coding sequence or partial coding sequence of the essential gene.

[0548] In some embodiments, the cell comprises a genome with an exogenous coding sequence for a gene product of interest in frame with and downstream (3′) of a coding sequence of an essential gene, wherein the essential gene encodes a gene product that is required for survival and/or proliferation of the cell.

[0549] In some embodiments, the cell comprises a genome with an exogenous coding sequence for a gene product of interest in frame with and upstream (5′) of a coding sequence of an essential gene, wherein the essential gene encodes a gene product that is required for survival and/or proliferation of the cell.

[0550] In some embodiments, the cell comprises a genomic modification, wherein the genomic modification comprises an insertion of an exogenous knock-in cassette within an endogenous coding sequence of an essential gene in the cell's genome, wherein the essential gene encodes a gene product that is required for survival and/or proliferation of the cell, wherein the knock-in cassette comprises an exogenous coding sequence for a gene product of interest in frame with and downstream (3′) of an exogenous coding sequence or partial coding sequence encoding the gene product of the essential gene, or a functional variant thereof, and wherein the cell expresses the gene product of interest and the gene product encoded by the essential gene that is required for survival and/or proliferation of the cell, or a functional variant thereof. In some embodiments, the gene product of interest and the gene product encoded by the essential gene are expressed from the endogenous promoter of the essential gene.

### Donor Template

[0551] In one aspect the present disclosure provides a donor template comprising a knock-in cassette with an exogenous coding sequence for a gene product of interest in frame with and downstream (3′) of an exogenous coding sequence or partial coding sequence of an essential gene, wherein the essential gene encodes a gene product that is required for survival and/or proliferation of the cell.

[0552] In one aspect the present disclosure provides an impetus for designing donor templates comprising a knock-in cassette with an exogenous coding sequence for a gene product of interest in frame with and upstream (5′) of an exogenous coding sequence or partial coding sequence of an essential gene, wherein the essential gene encodes a gene product that is required for survival and/or proliferation of the cell; see e.g., FIG. 3D.

[0553] In some embodiments, the donor template is for use in editing the genome of a cell by homology-directed repair (HDR).

[0554] Donor template design is described in detail in the literature, for instance in PCT Publication No. WO2016/073990A1. Donor templates can be single-stranded or double-stranded and can be used to facilitate HDR-based repair of double-strand breaks (DSBs), and are particularly useful for inserting a new sequence into the target sequence, or replacing the target sequence altogether. In some embodiments, the donor template is a donor DNA template. In some embodiments the donor DNA template is double-stranded.

[0555] Whether single-stranded or double stranded, donor templates generally include regions that are homologous to regions of DNA within or near (e.g., flanking or adjoining) a target sequence to be cleaved. These homologous regions are referred to herein as “homology arms,” and are illustrated schematically below relative to the knock-in cassette (which may be separated from one or both of the homology arms by additional spacer sequences that are not shown):

[0556] [5′ homology arm]—[knock-in cassette]—[3′ homology arm].

[0557] The homology arms can have any suitable length (including 0 nucleotides if only one homology arm is used), and 5′ and 3′ homology arms can have the same length, or can differ in length. The selection of appropriate homology arm lengths can be influenced by a variety of factors, such as the desire to avoid homologies or microhomologies with certain sequences such as Alu repeats or other very common elements. For example, a 5′ homology arm can be shortened to avoid a sequence repeat element. In other embodiments, a 3′ homology arm can be shortened to avoid a sequence repeat element. In some embodiments, both the 5′ and the 3′ homology arms can be shortened to avoid including certain sequence repeat elements.

[0558] In some embodiments, more than one donor template can be administered to a cell population. In some embodiments, the more than one donor templates are different, for example, each donor template facilitates knock-in of “cargo” sequences encoding different gene products of interest. In some embodiments, the more than one donor templates can be provided at the same time and their payloads incorporated into the same essential gene (e.g., one incorporated at one allele, the other incorporated at the other allele). In some embodiments, this may be particularly advantageous when a particular transgene system and/or gene product of interest has functional sequences that require them to be separated into different alleles of an essential gene. Further, in some embodiments, having multiple copies of gene targets of interest that are different but accomplish a similar goal, e.g., copies of safety switches, can be helpful to assure the functionality and creation of a corresponding phenotype. In some embodiments, more than one copy of a safety switch can ensure elimination of cells when necessary. Further, in some embodiments, certain safety switches requires dimerization to function as a suicide switch system (e.g., as described herein). In some embodiments, when more than one donor template is administered to a cell population, such donor templates may be designed to integrate at the same genetic locus, or at different genetic loci.

[0559] A donor template can be a nucleic acid vector, such as a viral genome or circular double-stranded DNA, e.g., a plasmid. Nucleic acid vectors comprising donor templates can include other coding or non-coding elements. For example, a donor template nucleic acid can be delivered as part of a viral genome (e.g., in an AAV, adenoviral, Sendai virus, or lentiviral genome) that includes certain genomic backbone elements (e.g., inverted terminal repeats, in the case of an AAV genome). In some embodiments, a donor template is comprised in a plasmid that has not been linearized. In some embodiments, a donor template is comprised in a plasmid that has been linearized. In some embodiments, a donor template is comprised within a linear dsDNA fragment. In some embodiments, a donor template nucleic acid can be delivered as part of an AAV genome. In some embodiments, a donor template nucleic acid can be delivered as a single stranded oligo donor (ssODN), for example, as a long multi-kb ssODN derived from m13 phage synthesis, or alternatively, short ssODNs, e.g., that comprise small genes of interest, tags, and/or probes. In some embodiments, a donor template nucleic acid can be delivered as a Doggybone™ DNA (dbDNA™) template. In some embodiments, a donor template nucleic acid can be delivered as a DNA minicircle. In some embodiments, a donor template nucleic acid can be delivered as a Integration-deficient Lentiviral Particle (IDLV). In some embodiments, a donor template nucleic acid can be delivered as a MMLV-derived retrovirus. In some embodiments, a donor template nucleic acid can be delivered as a piggyBac™ sequence. In some embodiments, a donor template nucleic acid can be delivered as a replicating EBNA1 episome.

[0560] In certain embodiments, the 5′ homology arm may be about 25 to about 1,000 base pairs in length, e.g., at least about 100, 200, 400, 600, or 800 base pairs in length. In certain embodiments, the 5′ homology arm comprises about 50 to 800 base pairs, e.g., 100 to 800, 200 to 800, 400 to 800, 400 to 600, or 600 to 800 base pairs. In certain embodiments, the 3′ homology arm may be about 25 to about 1,000 base pairs in length, e.g., at least about 100, 200, 400, 600, or 800 base pairs in length. In certain embodiments, the 3′ homology arm comprises about 50 to 800 base pairs, e.g., 100 to 800, 200 to 800, 400 to 800, 400 to 600, or 600 to 800 base pairs. In certain embodiments, the 5′ and 3′ homology arms are symmetrical in length. In certain embodiments, the 5′ and 3′ homology arms are asymmetrical in length.

[0561] In certain embodiments, a 5′ homology arm is less than about 3,000 base pairs, less than about 2,900 base pairs, less than about 2,800 base pairs, less than about 2,700 base pairs, less than about 2,600 base pairs, less than about 2,500 base pairs, less than about 2,400 base pairs, less than about 2,300 base pairs, less than about 2,200 base pairs, less than about 2,100 base pairs, less than about 2,000 base pairs, less than about 1,900 base pairs, less than about 1,800 base pairs, less than about 1,700 base pairs, less than about 1,600 base pairs, less than about 1,500 base pairs, less than about 1,400 base pairs, less than about 1,300 base pairs, less than about 1,200 base pairs, less than about 1,100 base pairs, less than about 1,000 base pairs, less than about 900 base pairs, less than about 800 base pairs, less than about 700 base pairs, less than about 600 base pairs, less than about 500 base pairs, or less than about 400 base pairs.

[0562] In certain embodiments, e.g., where a viral vector is utilized to introduce a knock-in cassette through a method described herein, a 5′ homology arm is less than about 1,000 base pairs, less than about 900 base pairs, less than about 800 base pairs, is less than about 700 base pairs, less than about 600 base pairs, less than about 500 base pairs, less than about 400 base pairs, or less than about 300 base pairs. In certain embodiments, e.g., where a viral vector is utilized to introduce a knock-in cassette through a method described herein, a 5′ homology arm is about 400-600 base pairs, e.g., about 500 base pairs.

[0563] In certain embodiments, a 3′ homology arm is less than about 3,000 base pairs, less than about 2,900 base pairs, less than about 2,800 base pairs, less than about 2,700 base pairs, less than about 2,600 base pairs, less than about 2,500 base pairs, less than about 2,400 base pairs, less than about 2,300 base pairs, less than about 2,200 base pairs, less than about 2,100 base pairs, less than about 2,000 base pairs, less than about 1,900 base pairs, less than about 1,800 base pairs, less than about 1,700 base pairs, less than about 1,600 base pairs, less than about 1,500 base pairs, less than about 1,400 base pairs, less than about 1,300 base pairs, less than about 1,200 base pairs, less than about 1,100 base pairs, less than 1,000 base pairs, less than about 900 base pairs, less than about 800 base pairs, less than about 700 base pairs, less than about 600 base pairs, less than about 500 base pairs, or less than about 400 base pairs.

[0564] In certain embodiments, e.g., where a viral vector is utilized to introduce a knock-in cassette through a method described herein, a 3′ homology arm is less than about 1,000 base pairs, less than about 900 base pairs, less than about 800 base pairs, less than about 700 base pairs, less than about 600 base pairs, less than about 500 base pairs, less than about 400 base pairs, or less than about 300 base pairs. In certain embodiments, e.g., where a viral vector is utilized to introduce a knock-in cassette through a method described herein, a 3′ homology arm is about 400-600 base pairs, e.g., about 500 base pairs.

[0565] In certain embodiments, the 5′ and 3′ homology arms flank the break and are less than 100, 75, 50, 25, 15, 10 or 5 base pairs away from an edge of the break. In certain embodiments, the 5′ and 3′ homology arms flank an endogenous stop codon. In certain embodiments, the 5′ and 3′ homology arms flank a break located within about 500 base pairs (e.g., about 500 base pairs, about 450 base pairs, about 400 base pairs, about 350 base pairs, about 300 base pairs, about 250 base pairs, about 200 base pairs, about 150 base pairs, about 100 base pairs, about 50 base pairs, or about 25 base pairs) upstream (5′) of an endogenous stop codon, e.g., the stop codon of an essential gene. In certain embodiments, the 5′ homology arm encompasses an edge of the break.

[0566] Knock-In Cassette

[0567] In some embodiments, a knock-in cassette within the donor template comprises an exogenous coding sequence for the gene product of interest in frame with and downstream (3′) of an exogenous coding sequence or partial coding sequence of the essential gene. In some embodiments, a knock-in cassette within a donor template comprises an exogenous coding sequence for the gene product of interest in frame with and upstream (5′) of an exogenous coding sequence or partial coding sequence of an essential gene. In some embodiments, the knock-in cassette is a polycistronic knock-in cassette. In some embodiments, the knock-in cassette is a bicistronic knock-in cassette. In some embodiment the knock-in cassette does not comprise a reporter gene, e.g., a fluorescent reporter gene or an antibiotic resistance gene.

[0568] In some embodiments, a single essential gene locus will be targeted by two knock-in cassettes comprising different “cargo” sequences. In some embodiments, one allele will incorporate one knock-in cassette, while the other allele will incorporate the other knock-in cassette. In some embodiments, a gRNA utilized to generate an appropriate DNA break may be the same for each of the two different knock-in cassettes. In some embodiments, gRNAs utilized to generate appropriate DNA breaks for each of the two different knock-in cassettes may be different, such that the “cargo” sequence is incorporated at a different position for each allele. In some embodiments, such a different position for each allele may still be within the ultimate exons coding region. In some embodiments, such a different position for each allele may be within the penultimate exon (second to last), and/or ultimate (last) exons coding region. In some embodiments, such a different position for at least one of the alleles may be within the first exon. In some embodiments, such a different position for at least one of the alleles may be within the first or second exon.

[0569] In order to properly restore the essential gene coding region in the genetically modified cell (so that a functioning gene product is produced) the knock-in cassette does not need to comprise an exogenous coding sequence that corresponds to the entire coding sequence of the essential gene. Indeed, depending on the location of the break in the endogenous coding sequence of the essential gene it may be possible to restore the essential gene by providing a knock-in cassette that comprises a partial coding sequence of the essential gene, e.g., that corresponds to a portion of the endogenous coding sequence of the essential gene that spans the break and the entire region downstream of the break (minus the stop codon), and/or that corresponds to a portion of the endogenous coding sequence of the essential gene that spans the break and the entire region upstream of the break (up to and optionally including the start codon).

[0570] In order to minimize the size of the knock-in cassette it may in fact be advantageous, in some embodiments, to have the break located within the last 1500, 1000, 750, 500, 400, 300, 200, 100, or 50 base pairs of the endogenous coding sequence of the essential gene, i.e., towards the 3′ end of the coding sequence. In some embodiments, a base pair's location in a coding sequence may be defined 3′-to-5′ from an endogenous translational stop signal (e.g., a stop codon). In some embodiments, as used herein, an “endogenous coding sequence” can include both exonic and intronic base pairs, and refers to gene sequence occurring 5′ to an endogenous functional translational stop signal. In some embodiments, a break within an endogenous coding sequence comprises a break within one DNA strand. In some embodiments, a break within an endogenous coding sequence comprises a break within both DNA strands. In some embodiments, a break is located within the last 1000 base pairs of the endogenous coding sequence. In some embodiments, a break is located within the last 750 base pairs of the endogenous coding sequence. In some embodiments, a break is located within the last 600 base pairs of the endogenous coding sequence. In some embodiments, a break is located within the last 500 base pairs of the endogenous coding sequence. In some embodiments, a break is located within the last 400 base pairs of the endogenous coding sequence. In some embodiments, a break is located within the last 300 base pairs of the endogenous coding sequence. In some embodiments, a break is located within the last 250 base pairs of the endogenous coding sequence. In some embodiments, a break is located within the last 200 base pairs of the endogenous coding sequence. In some embodiments, a break is located within the last 150 base pairs of the endogenous coding sequence. In some embodiments, a break is located within the last 100 base pairs of the endogenous coding sequence. In some embodiments, a break is located within the last 75 base pairs of the endogenous coding sequence. In some embodiments, a break is located within the last 50 base pairs of the endogenous coding sequence. In some embodiments, a break is located within the last 21 base pairs of the endogenous coding sequence.

[0571] In some embodiments, the exogenous partial coding sequence of the essential gene in the knock-in cassette encodes a C-terminal fragment of a protein encoded by the essential gene, e.g., a fragment that is less than 500, 250, 150, 125, 100, 75, 50, 25, 20, 15 or 10 amino acids in length. In some embodiments, the exogenous partial coding sequence of the essential gene in the knock-in cassette is codon optimized. In some embodiments, the exogenous partial coding sequence of the essential gene in the knock-in cassette is codon optimized to eliminate at least one PAM site. In some embodiments, the exogenous partial coding sequence of the essential gene in the knock-in cassette is codon optimized to eliminate more than one PAM site. In some embodiments, the exogenous partial coding sequence of the essential gene in the knock-in cassette is codon optimized to eliminate all relevant nuclease specific PAM sites. In some embodiments, a C-terminal fragment of a protein encoded by the essential gene is about 140 amino acids in length. In some embodiments, a C-terminal fragment of a protein encoded by the essential gene is about 130 amino acids in length. In some embodiments, a C-terminal fragment of a protein encoded by the essential gene is about 120 amino acids in length. In some embodiments, the C-terminal fragment includes an amino acid sequence that is encoded by a region of the endogenous coding sequence of the essential gene that spans the break. In some embodiments, a C-terminal fragment includes an amino acid sequence that is encoded by a region of the endogenous coding sequence within 1 exon of the essential gene. In some embodiments, a C-terminal fragment includes an amino acid sequence that is encoded by a region of the endogenous coding sequence within 2 exons of the essential gene. In some embodiments, a C-terminal fragment includes an amino acid sequence that is encoded by a region of the endogenous coding sequence within 3 exons of the essential gene. In some embodiments, a C-terminal fragment includes an amino acid sequence that is encoded by a region of the endogenous coding sequence within 4 exons of the essential gene. In some embodiments, a C-terminal fragment includes an amino acid sequence that is encoded by a region of the endogenous coding sequence within 5 exons of the essential gene.

[0572] In some embodiments, the exogenous partial coding sequence of an essential gene in a knock-in cassette encodes a C-terminal fragment of a protein encoded by an essential gene, e.g., a fragment that is less than 500, 250, 150, 125, 100, 75, 50, 25, 20, 19, 18, 17, 16, 15, 14, 13, 12, 11, 10, 9, 8, or 7 amino acids in length. In some embodiments, the exogenous partial coding sequence of an essential gene in a knock-in cassette encodes a 20 amino acid C-terminal fragment of a protein encoded by an essential gene. In some embodiments, the exogenous partial coding sequence of an essential gene in a knock-in cassette encodes a 19 amino acid C-terminal fragment of a protein encoded by an essential gene. In some embodiments, the exogenous partial coding sequence of an essential gene in a knock-in cassette encodes a 18 amino acid C-terminal fragment of a protein encoded by an essential gene. In some embodiments, the exogenous partial coding sequence of an essential gene in a knock-in cassette encodes a 17 amino acid C-terminal fragment of a protein encoded by an essential gene. In some embodiments, the exogenous partial coding sequence of an essential gene in a knock-in cassette encodes a 16 amino acid C-terminal fragment of a protein encoded by an essential gene. In some embodiments, the exogenous partial coding sequence of an essential gene in a knock-in cassette encodes a 1 amino acid C-terminal fragment of a protein encoded by an essential gene.

[0573] In some embodiments, e.g., when the essential gene includes many exons as shown in the exemplary method of FIG. 3A, it may be advantageous to have the break within the last exon of the essential gene. In some embodiments, e.g., when the essential gene includes many exons as shown in the exemplary method of FIG. 3A, it may be advantageous to have the break within the penultimate exon of the essential gene. It is to be understood however that the present disclosure is not limited to any particular location for the break and that the available positions will vary depending on the nature and length of the essential gene and the length of the exogenous coding sequence for the gene product of interest. For example, for essential genes that include a few exons or when the gene product of interest is small it may be possible to locate the break in an upstream exon.

[0574] In order to minimize the size of the knock-in cassette it may in fact be advantageous, in some embodiments, to have the break located within the first 1500, 1000, 750, 500, 400, 300, 200, 100, or 50 base pairs of an endogenous coding sequence of the essential gene, i.e., starting from the 5′ end of a coding sequence. In some embodiments, a base pair's location in a coding sequence may be defined 5′-to-3′ from an endogenous translational start signal (e.g., a start codon). In some embodiments, as used herein, an “endogenous coding sequence” can include both exonic and intronic base pairs, and refers to gene sequence occurring 3′ to an endogenous functional translational start signal. In some embodiments, a break within an endogenous coding sequence comprises a break within one DNA strand. In some embodiments, a break within an endogenous coding sequence comprises a break within both DNA strands. In some embodiments, a break is located within the first 1000 base pairs of the endogenous coding sequence. In some embodiments, a break is located within the first 750 base pairs of a endogenous coding sequence. In some embodiments, a break is located within the first 600 base pairs of the endogenous coding sequence. In some embodiments, a break is located within the first 500 base pairs of the endogenous coding sequence. In some embodiments, a break is located within the first 400 base pairs of the endogenous coding sequence. In some embodiments, a break is located within the first 300 base pairs of the endogenous coding sequence. In some embodiments, a break is located within the first 250 base pairs of the endogenous coding sequence. In some embodiments, a break is located within the first 200 base pairs of the endogenous coding sequence. In some embodiments, a break is located within the first 150 base pairs of the endogenous coding sequence. In some embodiments, a break is located within the first 100 base pairs of the endogenous coding sequence. In some embodiments, a break is located within the first 75 base pairs of the endogenous coding sequence. In some embodiments, a break is located within the first 50 base pairs of the endogenous coding sequence. In some embodiments, a break is located within the first 21 base pairs of the endogenous coding sequence.

[0575] In some embodiments, the exogenous partial coding sequence of the essential gene in the knock-in cassette encodes an N-terminal fragment of a protein encoded by the essential gene, e.g., a fragment that is less than 500, 250, 150, 125, 100, 75, 50, 25, 20, 15 or 10 amino acids in length. In some embodiments, an N-terminal fragment of a protein encoded by the essential gene is about 140 amino acids in length. In some embodiments, an N-terminal fragment of a protein encoded by the essential gene is about 130 amino acids in length. In some embodiments, an N-terminal fragment of a protein encoded by the essential gene is about 120 amino acids in length. In some embodiments, an N-terminal fragment includes an amino acid sequence that is encoded by a region of the endogenous coding sequence of the essential gene that spans the break. In some embodiments, an N-terminal fragment includes an amino acid sequence that is encoded by a region of the endogenous coding sequence within 1 exon of the essential gene. In some embodiments, an N-terminal fragment includes an amino acid sequence that is encoded by a region of the endogenous coding sequence within 2 exons of the essential gene. In some embodiments, an N-terminal fragment includes an amino acid sequence that is encoded by a region of the endogenous coding sequence within 3 exons of the essential gene. In some embodiments, an N-terminal fragment includes an amino acid sequence that is encoded by a region of the endogenous coding sequence within 4 exons of the essential gene. In some embodiments, an N-terminal fragment includes an amino acid sequence that is encoded by a region of the endogenous coding sequence within 5 exons of the essential gene.

[0576] In some embodiments, the exogenous partial coding sequence of an essential gene in a knock-in cassette encodes an N-terminal fragment of a protein encoded by an essential gene, e.g., a fragment that is less than 500, 250, 150, 125, 100, 75, 50, 25, 20, 19, 18, 17, 16, 15, 14, 13, 12, 11, 10, 9, 8, or 7 amino acids in length. In some embodiments, the exogenous partial coding sequence of an essential gene in a knock-in cassette encodes a 20 amino acid N-terminal fragment of a protein encoded by an essential gene. In some embodiments, the exogenous partial coding sequence of an essential gene in a knock-in cassette encodes a 19 amino acid N-terminal fragment of a protein encoded by an essential gene. In some embodiments, the exogenous partial coding sequence of an essential gene in a knock-in cassette encodes a 18 amino acid N-terminal fragment of a protein encoded by an essential gene. In some embodiments, the exogenous partial coding sequence of an essential gene in a knock-in cassette encodes a 17 amino acid N-terminal fragment of a protein encoded by an essential gene. In some embodiments, the exogenous partial coding sequence of an essential gene in a knock-in cassette encodes a 16 amino acid N-terminal fragment of a protein encoded by an essential gene. In some embodiments, the exogenous partial coding sequence of an essential gene in a knock-in cassette encodes a 1 amino acid N-terminal fragment of a protein encoded by an essential gene.

[0577] In some embodiments, the exogenous coding sequence or partial coding sequence of the essential gene in the knock-in cassette is less than 100% identical to the corresponding endogenous coding sequence of the essential gene of the cell, e.g., less than 99%, 98%, 97%, 96%, 95%, 94%, 93%, 92%, 91%, 90%, 85%, 80%, 75%, 70%, 65%, 60%, 55% or less than 50% (i.e., when the two sequences are aligned using a standard pairwise sequence alignment tool that maximizes the alignment between the corresponding sequences). For example, in some embodiments, the exogenous coding sequence or partial coding sequence of the essential gene in the knock-in cassette is codon optimized relative to the corresponding endogenous coding sequence of the essential gene of the cell, e.g., to prevent further binding of a nuclease to the target site. Alternatively or additionally it may be codon optimized to reduce the likelihood of recombination after integration of the knock-in cassette into the genome of the cell and/or to increase expression of the gene product of the essential gene and/or the gene product of interest after integration of the knock-in cassette into the genome of the cell.

[0578] In some embodiments, a knock-in cassette comprises one or more nucleotides or base pairs that differ (e.g., are mutations) relative to an endogenous knock-in site. In some embodiments, such mutations in a knock-in cassette provide resistance to cutting by a nuclease. In some embodiments, such mutations in a knock-in cassette prevent a nuclease from cutting the target loci following homologous recombination. In some embodiments, such mutations in a knock-in cassette occur within one or more coding and/or non-coding regions of a target gene. In some embodiments, such mutations in a knock-in cassette are silent mutations. In some embodiments, such mutations in a knock-in cassette are silent and/or missense mutations.

[0579] In some embodiments, such mutations in a knock-in cassette occur within a target protospacer motif and/or a target protospacer adjacent motif (PAM) site. In some embodiments, a knock-in cassette includes a target protospacer motif and/or a PAM site that are saturated with silent mutations. In some embodiments, a knock-in cassette includes a target protospacer motif and/or a PAM site that are approximately 30%, 40%, 50%, 60%, 70%, 80%, or 90% saturated with silent mutations. In some embodiments, a knock-in cassette includes a target protospacer motif and/or a PAM site that are saturated with silent and/or missense mutations. In some embodiments, a knock-in cassette includes a target protospacer motif and/or a PAM site that comprise at least one mutation, at least 2 mutations, at least 3 mutations, at least 4 mutations, at least 5 mutations, at least 6 mutations, at least 7 mutations, at least 8 mutations, at least 9 mutations, at least 10 mutations, at least 11 mutations, at least 12 mutations, at least 13 mutations, at least 14 mutations, or at least 15 mutations.

[0580] In some embodiments, certain codons encoding certain amino acids in a target site cannot be mutated through codon-optimization without losing some portion of an endogenous proteins natural function. In some embodiments, certain codons encoding certain amino acids in a target site cannot be mutated through codon-optimization.

[0581] In some embodiments, the knock-in cassette is codon optimized in only a portion of the coding sequence. For example, in some embodiments, a knock-in cassette encodes a C-terminal fragment of a protein encoded by an essential gene, e.g., a fragment that is less than 500, 250, 150, 125, 100, 75, 50, 25, 20, 19, 18, 17, 16, 15, 14, 13, 12, 11, 10, 9, 8, or 7 amino acids in length. In some embodiments, the exogenous partial coding sequence of an essential gene in a knock-in cassette that has been codon optimized encodes a 20 amino acid C-terminal fragment of a protein encoded by an essential gene. In some embodiments, the exogenous partial coding sequence of an essential gene in a knock-in cassette that has been codon optimized encodes a 19 amino acid C-terminal fragment of a protein encoded by an essential gene. In some embodiments, the exogenous partial coding sequence of an essential gene in a knock-in cassette that has been codon optimized encodes a 18 amino acid C-terminal fragment of a protein encoded by an essential gene. In some embodiments, the exogenous partial coding sequence of an essential gene in a knock-in cassette that has been codon optimized encodes a 17 amino acid C-terminal fragment of a protein encoded by an essential gene. In some embodiments, the exogenous partial coding sequence of an essential gene in a knock-in cassette that has been codon optimized encodes a 16 amino acid C-terminal fragment of a protein encoded by an essential gene. In some embodiments, the exogenous partial coding sequence of an essential gene in a knock-in cassette that has been codon optimized encodes a 15 amino acid C-terminal fragment of a protein encoded by an essential gene. In some embodiments, the exogenous partial coding sequence of an essential gene in a knock-in cassette that has been codon optimized encodes a 14 amino acid C-terminal fragment of a protein encoded by an essential gene. In some embodiments, the exogenous partial coding sequence of an essential gene in a knock-in cassette that has been codon optimized encodes a 13 amino acid C-terminal fragment of a protein encoded by an essential gene. In some embodiments, the exogenous partial coding sequence of an essential gene in a knock-in cassette that has been codon optimized encodes a 12 amino acid C-terminal fragment of a protein encoded by an essential gene. In some embodiments, the exogenous partial coding sequence of an essential gene in a knock-in cassette that has been codon optimized encodes a 11 amino acid C-terminal fragment of a protein encoded by an essential gene. In some embodiments, the exogenous partial coding sequence of an essential gene in a knock-in cassette that has been codon optimized encodes a 10 amino acid C-terminal fragment of a protein encoded by an essential gene. In some embodiments, the exogenous partial coding sequence of an essential gene in a knock-in cassette that has been codon optimized encodes a 9 amino acid C-terminal fragment of a protein encoded by an essential gene. In some embodiments, the exogenous partial coding sequence of an essential gene in a knock-in cassette that has been codon optimized encodes a 8 amino acid C-terminal fragment of a protein encoded by an essential gene. In some embodiments, the exogenous partial coding sequence of an essential gene in a knock-in cassette that has been codon optimized encodes a 7 amino acid C-terminal fragment of a protein encoded by an essential gene. In some embodiments, the exogenous partial coding sequence of an essential gene in a knock-in cassette that has been codon optimized encodes a 6 amino acid C-terminal fragment of a protein encoded by an essential gene. In some embodiments, the exogenous partial coding sequence of an essential gene in a knock-in cassette that has been codon optimized encodes a 5 amino acid C-terminal fragment of a protein encoded by an essential gene. In some embodiments, the exogenous partial coding sequence of an essential gene in a knock-in cassette that has been codon optimized encodes an amino acid C-terminal fragment that is less than 5 amino acids of a protein encoded by an essential gene.

[0582] In some embodiments, the knock-in cassette is codon optimized in only a portion of the coding sequence. For example, in some embodiments, a knock-in cassette encodes an N-terminal fragment of a protein encoded by an essential gene, e.g., a fragment that is less than 500, 250, 150, 125, 100, 75, 50, 25, 20, 19, 18, 17, 16, 15, 14, 13, 12, 11, 10, 9, 8, or 7 amino acids in length. In some embodiments, the exogenous partial coding sequence of an essential gene in a knock-in cassette that has been codon optimized encodes a 20 amino acid N-terminal fragment of a protein encoded by an essential gene. In some embodiments, the exogenous partial coding sequence of an essential gene in a knock-in cassette that has been codon optimized encodes a 19 amino acid N-terminal fragment of a protein encoded by an essential gene. In some embodiments, the exogenous partial coding sequence of an essential gene in a knock-in cassette that has been codon optimized encodes a 18 amino acid N-terminal fragment of a protein encoded by an essential gene. In some embodiments, the exogenous partial coding sequence of an essential gene in a knock-in cassette that has been codon optimized encodes a 17 amino acid N-terminal fragment of a protein encoded by an essential gene. In some embodiments, the exogenous partial coding sequence of an essential gene in a knock-in cassette that has been codon optimized encodes a 16 amino acid N-terminal fragment of a protein encoded by an essential gene. In some embodiments, the exogenous partial coding sequence of an essential gene in a knock-in cassette that has been codon optimized encodes a 15 amino acid N-terminal fragment of a protein encoded by an essential gene. In some embodiments, the exogenous partial coding sequence of an essential gene in a knock-in cassette that has been codon optimized encodes a 14 amino acid N-terminal fragment of a protein encoded by an essential gene. In some embodiments, the exogenous partial coding sequence of an essential gene in a knock-in cassette that has been codon optimized encodes a 13 amino acid N-terminal fragment of a protein encoded by an essential gene. In some embodiments, the exogenous partial coding sequence of an essential gene in a knock-in cassette that has been codon optimized encodes a 12 amino acid N-terminal fragment of a protein encoded by an essential gene. In some embodiments, the exogenous partial coding sequence of an essential gene in a knock-in cassette that has been codon optimized encodes a 11 amino acid N-terminal fragment of a protein encoded by an essential gene. In some embodiments, the exogenous partial coding sequence of an essential gene in a knock-in cassette that has been codon optimized encodes a 10 amino acid N-terminal fragment of a protein encoded by an essential gene. In some embodiments, the exogenous partial coding sequence of an essential gene in a knock-in cassette that has been codon optimized encodes a 9 amino acid N-terminal fragment of a protein encoded by an essential gene. In some embodiments, the exogenous partial coding sequence of an essential gene in a knock-in cassette that has been codon optimized encodes a 8 amino acid N-terminal fragment of a protein encoded by an essential gene. In some embodiments, the exogenous partial coding sequence of an essential gene in a knock-in cassette that has been codon optimized encodes a 7 amino acid N-terminal fragment of a protein encoded by an essential gene. In some embodiments, the exogenous partial coding sequence of an essential gene in a knock-in cassette that has been codon optimized encodes a 6 amino acid N-terminal fragment of a protein encoded by an essential gene. In some embodiments, the exogenous partial coding sequence of an essential gene in a knock-in cassette that has been codon optimized encodes a 5 amino acid N-terminal fragment of a protein encoded by an essential gene. In some embodiments, the exogenous partial coding sequence of an essential gene in a knock-in cassette that has been codon optimized encodes an amino acid N-terminal fragment that is less than 5 amino acids of a protein encoded by an essential gene.

[0583] In some embodiments, the knock-in cassette comprises one or more sequences encoding a linker peptide, e.g., between an exogenous coding sequence or partial coding sequence of the essential gene and a “cargo” sequence and/or a regulatory element described herein. Such linker peptides are known in the art, any of which can be included in a knock-in cassette described herein. In some embodiments, the linker peptide comprises the amino acid sequence GSG.

[0584] In some embodiments, the knock-in cassette comprises other regulatory elements such as a polyadenylation sequence, and optionally a 3′ UTR sequence, downstream of the exogenous coding sequence for the gene product of interest. If a 3′UTR sequence is present, the 3′UTR sequence is positioned 3′ of the exogenous coding sequence and 5′ of the polyadenylation sequence.

[0585] In some embodiments, the knock-in cassette comprises other regulatory elements such as a 5′ UTR and a start codon, upstream of the exogenous coding sequence for the gene product of interest. If a 5′UTR sequence is present, the 5′UTR sequence is positioned 5′ of the “cargo” sequence and/or exogenous coding sequence.

[0586] Exemplary Homology Arms (HA)

[0587] In certain embodiments, a donor template comprises a 5′ and/or 3′ homology arm homologous to region of a GAPDH locus. In some embodiments, a donor template comprises a 5′ homology arm comprising or consisting of the sequence of SEQ ID NO:1, 2, or 3. In some embodiments, a 5′ homology arm comprises or consists of a sequence that is at least 85%, 90%, 95%, 98% or 99% identical to the sequence of SEQ ID NO: 1, 2, or 3. In some embodiments, a donor template comprises a 3′ homology arm comprising or consisting of the sequence of SEQ ID NO:4 or 5. In certain embodiments, a 3′ homology arm comprises or consists of a sequence that is at least 85%, 90%, 95%, 98% or 99% identical to the sequence of SEQ ID NO: 4 or 5.

[0588] In some embodiments, a donor template comprises a 5′ homology arm comprising SEQ ID NO: 1, and a 3′ homology arm comprising SEQ ID NO: 4. In some embodiments, a donor template comprises a 5′ homology arm comprising SEQ ID NO: 2, and a 3′ homology arm comprising SEQ ID NO: 4. In some embodiments, a donor template comprises a 5′ homology arm comprising SEQ ID NO: 3, and a 3′ homology arm comprising SEQ ID NO:5.

[0589] In some embodiments, a stretch of sequence flanking a nuclease cleavage site may be duplicated in both a 5′ and 3′ homology arm. In some embodiments, such a duplication is designed to optimize HDR efficiency. In some embodiments, one of the duplicated sequences may be codon optimized, while the other sequence is not codon optimized. In some embodiments, both of the duplicated sequences may be codon optimized. In some embodiments, codon optimization may remove a target PAM site. In some embodiments, a duplicated sequence may be no more than: 100 bp in length, 90 bp in length, 80 bp in length, 70 bp in length, 60 bp in length, 50 bp in length, 40 bp in length, 30 bp in length, or 20 bp in length.

-exemplary 5′ HA for knock-in cassette insertion at GAPDH locus
SEQ ID NO: 1
GAAGACTGTGGATGGCCCCTCCGGGAAACTGTGGCGTGATGGCCGCGGGGCTCTCCAGAACATC
ATCCCTGCCTCTACTGGCGCTGCCAAGGCTGTGGGCAAGGTCATCCCTGAGCTGAACGGGAAGC
TCACTGGCATGGCCTTCCGTGTCCCCACTGCCAACGTGTCAGTGGTGGACCTGACCTGCCGTCT
AGAAAAACCTGCCAAATATGATGACATCAAGAAGGTGGTGAAGCAGGCGTCGGAGGGCCCCCTC
AAGGGCATCCTGGGCTACACTGAGCACCAGGTGGTCTCCTCTGACTTCAACAGCGACACCCACT
CCTCCACCTTTGACGCTGGGGCTGGCATTGCCCTCAACGACCACTTTGTCAAGCTCATTTCCTG
GTATGTGGCTGGGGCCAGAGACTGGCTCTTAAAAAGTGCAGGGTCTGGCGCCCTCTGGTGGCTG
GCTCAGAAAAAGGGCCCTGACAACTCTTTACATCTTCTAGGTATGACAACGAGTTCGGATATAG
CAATAGAGTGGTCGATCTGATGGCTCATATGGCTAGCAAAGAG
-exemplary 5′ HA for knock-in cassette insertion at GAPDH locus
SEQ ID NO: 2
GAAGACTGTGGATGGCCCCTCCGGGAAACTGTGGCGTGATGGCCGCGGGGCTCTCCAGAACATC
ATCCCTGCCTCTACTGGCGCTGCCAAGGCTGTGGGCAAGGTCATCCCTGAGCTGAACGGGAAGC
TCACTGGCATGGCCTTCCGTGTCCCCACTGCCAACGTGTCAGTGGTGGACCTGACCTGCCGTCT
AGAAAAACCTGCCAAATATGATGACATCAAGAAGGTGGTGAAGCAGGCGTCGGAGGGCCCCCTC
AAGGGCATCCTGGGCTACACTGAGCACCAGGTGGTCTCCTCTGACTTCAACAGCGACACCCACT
CCTCCACCTTTGACGCTGGGGCTGGCATTGCCCTCAACGACCACTTTGTCAAGCTCATTTCCTG
GTATGTGGCTGGGGCCAGAGACTGGCTCTTAAAAAGTGCAGGGTCTGGCGCCCTCTGGTGGCTG
GCTCAGAAAAAGGGCCCTGACAACTCTTTACATCTTCTAGGTATGACAACGAGTTCGGATATAG
CAATAGAGTGGTCGATCTGATGGCTCATATGGCTAGCAAAGAGGGAAGCGGAGCTACTAACTTC
AGCCTGCTGAAGCAGGCTGGAGACGTGGAGGAGAACCCTGGACCT
-exemplary 5′ HA for knock-in cassette insertion at GAPDH locus
SEQ ID NO: 3
GGCTTTCCCATAATTTCCTTTCAAGGTGGGGAGGGAGGTAGAGGGGTGATGTGGGGAGTACGCT
GCAGGGCCTCACTCCTTTTGCAGACCACAGTCCATGCCATCACTGCCACCCAGAAGACTGTGGA
TGGCCCCTCCGGGAAACTGTGGCGTGATGGCCGCGGGGCTCTCCAGAACATCATCCCTGCCTCT
ACTGGCGCTGCCAAGGCTGTGGGCAAGGTCATCCCTGAGCTGAACGGGAAGCTCACTGGCATGG
CCTTCCGTGTCCCCACTGCCAACGTGTCAGTGGTGGACCTGACCTGCCGTCTAGAAAAACCTGC
CAAATATGATGACATCAAGAAGGTGGTGAAGCAGGCGTCGGAGGGCCCCCTCAAGGGCATCCTG
GGCTACACTGAGCACCAGGTGGTCTCCTCTGACTTCAACAGCGACACCCACTCCTCCACCTTTG
ACGCTGGGGCTGGCATTGCCCTCAACGACCACTTTGTCAAGCTCATCTCTTGGTACGACAATGA
GTTCGGATATAGCAATAGAGTGGTCGATCTGATGGCTCATATGGCTAGCAAAGAG
-exemplary 3′ HA for knock-in cassette insertion at GAPDH locus
SEQ ID NO: 4
ATTTGGCTACAGCAACAGGGTGGTGGACCTCATGGCCCACATGGCCTCCAAGGAGTAAGACCCC
TGGACCACCAGCCCCAGCAAGAGCACAAGAGGAAGAGAGAGACCCTCACTGCTGGGGAGTCCCT
GCCACACTCAGTCCCCCACCACACTGAATCTCCCCTCCTCACAGTTGCCATGTAGACCCCTTGA
AGAGGGGAGGGGCCTAGGGAGCCGCACCTTGTCATGTACCATCAATAAAGTACCCTGTGCTCAA
CCAGTTACTTGTCCTGTCTTATTCTAGGGTCTGGGGCAGAGGGGAGGGAAGCTGGGCTTGTGTC
AAGGTGAGACATTCTTGCTGGGGAGGGACCTGGTATGTTCTCCTCAGACTGAGGGTAGGGCCTC
CAAACAGCCTTGCTTGCTTCGAGAACCATTTGCTTCCCGCTCAGACGTCTTGAGTGCTACAGGA
AGCTGGCACCACTACTTCAGAGAACAAGGCCTTTTCCTCTCCTCGCTCCAGT
-exemplary 3′ HA for knock-in cassette insertion at GAPDH locus
SEQ ID NO: 5
AGACTGGCTCTTAAAAAGTGCAGGGTCTGGCGCCCTCTGGTGGCTGGCTCAGAAAAAGGGCCCT
GACAACTCTTTTCATCTTCTAGGTATGACAACGAATTTGGCTACAGCAACAGGGTGGTGGACCT
CATGGCCCACATGGCCTCCAAGGAGTAAGACCCCTGGACCACCAGCCCCAGCAAGAGCACAAGA
GGAAGAGAGAGACCCTCACTGCTGGGGAGTCCCTGCCACACTCAGTCCCCCACCACACTGAATC
TCCCCTCCTCACAGTTGCCATGTAGACCCCTTGAAGAGGGGAGGGGCCTAGGGAGCCGCACCTT
GTCATGTACCATCAATAAAGTACCCTGTGCTCAACCAGTTACTTGTCCTGTCTTATTCTAGGGT
CTGGGGCAGAGGGGAGGGAAGCTGGGCTTGTGTCAAGGTGAGACATTCTTGCTGGGGAGGGACC
TGGTATGTTCTCCTCAGACTGAGGGTAGGGCCTCCAAACAGCCTTGCTTGCT

[0590] In some embodiments, a donor template comprises a 5′ and/or 3′ homology arm homologous to a region of a TBP locus. In some embodiments, a donor template comprises a 5′ homology arm comprising or consisting of the sequence of SEQ ID NO:6, 7, or 8. In some embodiments, a 5′ homology arm comprises or consists of a sequence that is at least 85%, 90%, 95%, 98% or 99% identical to the sequence of SEQ ID NO: 6, 7, or 8. In some embodiments, a donor template comprises a 3′ homology arm comprising or consisting of the sequence of SEQ ID NO:9, 10, or 11. In certain embodiments, a 3′ homology arm comprises or consists of a sequence that is at least 85%, 90%, 95%, 98% or 99% identical to the sequence of SEQ ID NO: 9, 10, or 11.

[0591] In some embodiments, a donor template comprises a 5′ homology arm comprising SEQ ID NO: 6, and a 3′ homology arm comprising SEQ ID NO: 9. In some embodiments, a donor template comprises a 5′ homology arm comprising SEQ ID NO: 7, and a 3′ homology arm comprising SEQ ID NO: 10. In some embodiments, a donor template comprises a 5′ homology arm comprising SEQ ID NO: 8, and a 3′ homology arm comprising SEQ ID NO: 11.

-exemplary 5′ HA for knock-in cassette insertion at TBP locus
SEQ ID NO: 6
GCAGACTTCCATTTACAGTGAGGAGGTGAGCATTGCATTGAACAAAAGATGGCGTTTTCACTTG
GAATTAGTTATCTGAAGCTTTAGGATTCCTCAGCAATATGATTATGAGACAAGAAAGGAAGATT
CAGAAATGAGTCTAGTTGAAGGGAGCAATTCAGAGAAGAAGATTGAGTTGTTATCATTGCCGTC
CTGCTTGGTTTATGGCCTGGTTCAGGACCAAGGAGAGAAGTGTGAATACATGCCTCTTGAGCTA
TAGAATGAGACGCTGGAGTCACTAAGATGATTTTTTAAAAGTATTGTTTTATAAACAAAAATAA
GATTGTGACAAGGGATTCCACTATTAATGTTTTCATGCCTGTGCCTTAATCTGACTGGGTATGG
TGAGAATTGTGCTTGCAGCTTTAAGGTAAGAATTTTACCATCTTAATATGTTAAGAAGTGCCAT
TTCAGTCTCTCATCTCTACTCCAACTTGTCTTCTTAGGTGCTAAAGTCAGAGCCGAAATCTACG
AGGCCTTCGAGAACATCTACCCCATCCTGAAGGGCTTCAGAAAGACCACC
-exemplary 5′ HA for knock-in cassette insertion at TBP locus
SEQ ID NO: 7
CTGACCACAGCTCTGCAAGCAGACTTCCATTTACAGTGAGGAGGTGAGCATTGCATTGAACAAA
AGATGGCGTTTTCACTTGGAATTAGTTATCTGAAGCTTTAGGATTCCTCAGCAATATGATTATG
AGACAAGAAAGGAAGATTCAGAAATGAGTCTAGTTGAAGGCAGCAATTCAGAGAAGAAGATTCA
GTTGTTATCATTGCCGTCCTGCTTGGTTTATGGCCTGGTTCAGGACCAAGGAGAGAAGTGTGAA
TACATGCCTCTTGAGCTATAGAATGAGACGCTGGAGTCACTAAGATGATTTTTTAAAAGTATTG
TTTTATAAACAAAAATAAGATTGTGACAAGGGATTCCACTATTAATGTTTTCATGCCTGTGCCT
TAATCTGACTGGGTATGGTGAGAATTGTGCTTGCAGCTTTAAGGTAAGAATTTTACCATCTTAA
TATGTTAAGAAGTGCCATTTCAGTCTCTCATCTCTACTCCAACTTGTCTTCTTAGGGGCTAAAG
TGCGGGCCGAGATCTACGAGGCCTTCGAGAATATCTACCCCATCCTGAAGGGCTTCAGAAAGAC
CACC
-exemplary 5′ HA for knock-in cassette insertion at TBP locus
SEQ ID NO: 8
ACAAAAGATGGCGTTTTCACTTGGAATTAGTTATCTGAAGCTTTAGGATTCCTCAGCAATATGA
TTATGAGACAAGAAAGGAAGATTCAGAAATGAGTCTAGTTGAAGGCAGCAATTCAGAGAAGAAG
ATTCAGTTGTTATCATTGCCGTCCTGCTTGGTTTATGGCCTGGTTCAGGACCAAGGAGAGAAGT
GTGAATACATGCCTCTTGAGCTATAGAATGAGACGCTGGAGTCACTAAGATGATTTTTTAAAAG
TATTGTTTTATAAACAAAAATAAGATTGTGACAAGGGATTCCACTATTAATGTTTTCATGCCTG
TGCCTTAATCTGACTGGGTATGGTGAGAATTGTGCTTGCAGCTTTAAGGTAAGAATTTTACCAT
CTTAATATGTTAAGAAGTGCCATTTCAGTCTCTCATCTCTACTCCAACTTGTCTTCTTAGGTGC
TAAAGTCAGAGCAGAAATTTATGAAGCATTCGAGAACATCTACCCTATTCTAAAGGGATTCAGG
AAGACGACG
-exemplary 3′ HA for knock-in cassette insertion at TBP locus
SEQ ID NO: 9
CAGAAATTTATGAAGCATTTGAAAACATCTACCCTATTCTAAAGGGATTCAGGAAGACGACGTA
ATGGCTCTCATGTACCCTTGCCTCCCCCACCCCCTTCTTTTTTTTTTTTTAAACAAATCAGTTT
GTTTTGGTACCTTTAAATGGTGGTGTTGTGAGAAGATGGATGTTGAGTTGCAGGGTGTGGCACC
AGGTGATGCCCTTCTGTAAGTGCCCACCGCGGGATGCCGGGAAGGGGCATTATTTGTGCACTGA
GAACACCGCGCAGCGTGACTGTGAGTTGCTCATACCGTGCTGCTATCTGGGCAGCGCTGCCCAT
TTATTTATATGTAGATTTTAAACACTGCTGTTGACAAGTTGGTTTGAGGGAGAAAACTTTAAGT
GTTAAAGCCACCTCTATAATTGATTGGACTTTTTAATTTTAATGTTTTTCCCCATGAACCACAG
TTTTTATATTTCTACCAGAAAAGTAAAAATCTTTTTTAAAAGTGTTGTTTTT
-exemplary 3′ HA for knock-in cassette insertion at TBP locus
SEQ ID NO: 10
TAGGTGCTAAAGTCAGAGCAGAAATTTATGAAGCATTTGAAAACATCTACCCTATTCTAAAGGG
ATTCAGGAAGACGACGTAATGGCTCTCATGTACCCTTGCCTCCCCCACCCCCTTCTTTTTTTTT
TTTTAAACAAATCAGTTTGTTTTGGTACCTTTAAATGGTGGTGTTGTGAGAAGATGGATGTTGA
GTTGCAGGGTGTGGCACCAGGTGATGCCCTTCTGTAAGTGCCCACCGCGGGATGCCGGGAAGGG
GCATTATTTGTGCACTGAGAACACCGCGCAGCGTGACTGTGAGTTGCTCATACCGTGCTGCTAT
CTGGGCAGCGCTGCCCATTTATTTATATGTAGATTTTAAACACTGCTGTTGACAAGTTGGTTTG
AGGGAGAAAACTTTAAGTGTTAAAGCCACCTCTATAATTGATTGGAGTTTTTAATTTTAATGTT
TTTCCCCATGAACCACAGTTTTTATATTTCTACCAGAAAAGTAAAAATCTTT
-exemplary 3′ HA for knock-in cassette insertion at TBP locus
SEQ ID NO: 11
AAGGGATTCAGGAAGACGACGTAATGGCTCTCATGTACCCTTGCCTCCCCCACCCCCTTCTTTT
TTTTTTTTTAAACAAATCAGTTTGTTTTGGTACCTTTAAATGGTGGTGTTGTGAGAAGATGGAT
GTTGAGTTGCAGGGTGTGGCACCAGGTGATGCCCTTCTGTAAGTGCCCACCGCGGGATGCCGGG
AAGGGGCATTATTTGTGCACTGAGAACACCGCGCAGCGTGACTGTGAGTTGCTCATACCGTGCT
GCTATCTGGGCAGCGCTGCCCATTTATTTATATGTAGATTTTAAACACTGCTGTTGACAAGTTG
GTTTGAGGGAGAAAACTTTAAGTGTTAAAGCCACCTCTATAATTGATTGGACTTTTTAATTTTA
ATGTTTTTCCCCATGAACCACAGTTTTTATATTTCTACCAGAAAAGTAAAAATCTTTTTTAAAA
GTGTTGTTTTTCTAATTTATAACTCCTAGGGGTTATTTCTGTGCCAGACACA

[0592] In some embodiments, a donor template comprises a 5′ and/or 3′ homology arm homologous to a region of a G6PD locus. In some embodiments, a donor template comprises a 5′ homology arm comprising or consisting of the sequence of SEQ ID NO:12. In some embodiments, a 5′ homology arm comprises or consists of a sequence that is at least 85%, 90%, 95%, 98% or 99% identical to the sequence of SEQ ID NO: 12. In some embodiments, a donor template comprises a 3′ homology arm comprising or consisting of the sequence of SEQ ID NO:13. In certain embodiments, a 3′ homology arm comprises or consists of a sequence that is at least 85%, 90%, 95%, 98% or 99% identical to the sequence of SEQ ID NO:13.

[0593] In some embodiments, a donor template comprises a 5′ homology arm comprising SEQ ID NO: 12, and a 3′ homology arm comprising SEQ ID NO: 13.

-exemplary 5′ HA for knock-in cassette insertion at G6PD locus
SEQ ID NO: 12
GGCCCGGGGGACTCCACATGGTGGCAGGCAGTGGCATCAGCAAGACACTCTCTCCCTCACAGAA
CGTGAAGCTCCCTGACGCCTATGAGCGCCTCATCCTGGACGTCTTCTGCGGGAGCCAGATGCAC
TTCGTGCGCAGGTGAGGCCCAGCTGCCGGCCCCTGCATACCTGTGGGCTATGGGGTGGCCTTTG
CCCTCCCTCCCTGTGTGCCACCGGCCTCCCAAGCCATACCATGTCCCCTCAGCGACGAGCTCCG
TGAGGCCTGGCGTATTTTCACCCCACTGCTGCACCAGATTGAGCTGGAGAAGCCCAAGCCCATC
CCCTATATTTATGGCAGGTGAGGAAAGGGTGGGGGCTGGGGACAGAGCCCAGCGGGCAGGGGCG
GGGTGAGGGTGGAGCTACCTCATGCCTCTCCTCCACCCGTCACTCTCCAGCCGAGGCCCCACGG
AGGCAGACGAGCTGATGAAGAGAGTGGGCTTCCAGTACGAGGGAACCTACAAATGGGTCAACCC
TCACAAGGTG
-exemplary 3′ HA for knock-in cassette insertion at G6PD locus
SEQ ID NO: 13
GTGGGTGAACCCCCACAAGCTCTGAGCCCTGGGCACCCACCTCCACCCCCGCCACGGCCACCCT
CCTTCCCGCCGCCCGACCCCGAGTCGGGAGGACTCCGGGACCATTGACCTCAGCTGCACATTCC
TGGCCCCGGGCTCTGGCCACCCTGGCCCGCCCCTCGCTGCTGCTACTACCCGAGCCCAGCTACA
TTCCTCAGCTGCCAAGCACTCGAGACCATCCTGGCCCCTCCAGACCCTGCCTGAGCCCAGGAGC
TGAGTCACCTCCTCCACTCACTCCAGCCCAACAGAAGGAAGGAGGAGGGCGCCCATTCGTCTGT
CCCAGAGCTTATTGGCCACTGGGTCTCACTCCTGAGTGGGGCCAGGGTGGGAGGGAGGGACGAG
GGGGAGGAAAGGGGCGAGCACCCACGTGAGAGAATCTGCCTGTGGCCTTGCCCGCCAGCCTCAG
TGCCACTTGACATTCCTTGTCACCAGCAACATCTCGAGCCCCCTGGATGTCC

[0594] In some embodiments, a donor template comprises a 5′ and/or 3′ homology arm homologous to a region of a E2F4 locus. In some embodiments, a donor template comprises a 5′ homology arm comprising or consisting of the sequence of SEQ ID NO: 14, 15, or 16. In some embodiments, a 5′ homology arm comprises or consists of a sequence that is at least 85%, 90%, 95%, 98% or 99% identical to the sequence of SEQ ID NO: 14, 15, or 16. In some embodiments, a donor template comprises a 3′ homology arm comprising or consisting of the sequence of SEQ ID NO: 17, 18, or 19. In certain embodiments, a 3′ homology arm comprises or consists of a sequence that is at least 85%, 90%, 95%, 98% or 99% identical to the sequence of SEQ ID NO: 17, 18, or 19.

[0595] In some embodiments, a donor template comprises a 5′ homology arm comprising SEQ ID NO: 14, and a 3′ homology arm comprising SEQ ID NO: 17. In some embodiments, a donor template comprises a 5′ homology arm comprising SEQ ID NO: 15, and a 3′ homology arm comprising SEQ ID NO: 18. In some embodiments, a donor template comprises a 5′ homology arm comprising SEQ ID NO: 16, and a 3′ homology arm comprising SEQ ID NO: 19.

-exemplary 5′ HA for knock-in cassette insertion at E2F4 locus
SEQ ID NO: 14
CCAGGGGGCTGTAGTGGGGCCAGGCTGGACCTCTGTGCCCTGAGCATGGCTTTCTTGTTTTTCA
GTTTTGGAACTCCCCAAAGAGCTGTCAGAAATCTTTGATCCCACACGAGGTAGGCTGCTGCATT
CCTCCCTGAGGCTAGGGGTAAGGGACACAGCTCATTGGGTCCTATGGCTGTTTTCTTGCCCTTT
TGAGGACCTTGTTGTGGCGCTTATGGTAACTGGGGCAAAGGGTGAAGTTCCTGATGGGCAGGTG
GGGTTCCCTTTCCTGGGCTTTGGTGGGTGGAGAGGTGGGAGCTGGAATGTTAGTAACTGAGCTC
CCTCCATTCCCAGAGTGCATGAGCTCGGAGCTGCTGGAGGAGTTGATGTCCTCAGAAGGTGGGT
GGCCCTGGAAGGTGGGAGTGGGTGTGGGCAGGGGTTGGGCTGCTGCTAGGGGAGCCCTGGCCCA
GGGCCTGAGACTAGTGCTCTCTGCAGTGTTCGCCCCTCTGCTGAGACTTTCTCCTCCTCCTGGC
GACCACGACTACATCTACAACCTGGACGAGAGCGAGGGCGTGTGCGACCTGTTTGATGTGCCCG
TGCTGAACCTG
-exemplary 5′ HA for knock-in cassette insertion at E2F4 locus
SEQ ID NO: 15
CCAGGCTGGACCTCTGTGCCCTGAGCATGGCTTTCTTGTTTTTCAGTTTTGGAACTCCCCAAAG
AGCTGTCAGAAATCTTTGATCCCACACGAGGTAGGCTGCTGCATTCCTCCCTGAGGCTAGGGGT
AAGGGACACAGCTCATTGGGTCCTATGGCTGTTTTCTTGCCCTTTTGAGGACCTTGTTGTGGCG
CTTATGGTAACTGGGGCAAAGGGTGAAGTTCCTGATGGGCAGGTGGGGTTCCCTTTCCTGGGCT
TTGGTGGGTGGAGAGGTGGGAGCTGGAATGTTAGTAACTGAGCTCCCTCCATTCCCAGAGTGCA
TGAGCTCGGAGCTGCTGGAGGAGTTGATGTCCTCAGAAGGTGGGTGGCCCTGGAAGGTGGGAGT
GGGTGTGGGCAGGGGTTGGGCTGCTGCTAGGGGAGCCCTGGCCCAGGGCCTGAGACTAGTGCTC
TCTGCAGTGTTTGCCCCTCTGCTTCGTCTTAGTCCTCCTCCGGGCGACCACGACTACATCTACA
ACCTGGACGAGAGCGAGGGCGTGTGCGACCTGTTTGATGTGCCCGTGCTGAACCTG
-exemplary 5′ HA for knock-in cassette insertion at E2F4 locus
SEQ ID NO: 16
GTCAGAAATCTTTGATCCCACACGAGGTAGGCTGCTGCATTCCTCCCTGAGGCTAGGGGTAAGG
GACACAGCTCATTGGGTCCTATGGCTGTTTTCTTGCCCTTTTGAGGACCTTGTTGTGGCGCTTA
TGGTAACTGGGGCAAAGGGTGAAGTTCCTGATGGGCAGGTGGGGTTCCCTTTCCTGGGCTTTGG
TGGGTGGAGAGGTGGGAGCTGGAATGTTAGTAACTGAGCTCCCTCCATTCCCAGAGTGCATGAG
CTCGGAGCTGCTGGAGGAGTTGATGTCCTCAGAAGGTGGGTGGCCCTGGAAGGTGGGAGTGGGT
GTGGGCAGGGGTTGGGCTGCTGCTAGGGGAGCCCTGGCCCAGGGCCTGAGACTAGTGCTCTCTG
CAGTGTTTGCCCCTCTGCTTCGTCTTTCTCCACCCCCGGGAGACCACGATTATATCTACAACCT
GGACGAGAGTGAAGGTGTCTGTGACCTCTTCGACGTGCCCGTGCTCAACCTC
-exemplary 3′ HA for knock-in cassette insertion at E2F4 locus
SEQ ID NO: 17
CCACCCCCGGGAGACCACGATTATATCTACAACCTGGACGAGAGTGAAGGTGTCTGTGACCTCT
TTGATGTGCCTGTTCTCAACCTCTGACTGACAGGGACATGCCCTGTGTGGCTGGGACCCAGACT
GTCTGACCTGGGGGTTGCCTGGGGACCTCTCCCACCCGACCCCTACAGAGCTTGAGAGCCACAG
ACGCCTGGCTTCTCCGGCCTCCCCTCACCGCACAGTTCTGGCCACAGCTCCCGCTCCTGTGCTG
GCACTTCTGTGCTCGCAGAGCAGGGGAACAGGACTCAGCCCCCATCACCGTGGAGCCAAAGTGT
TTGCTTCTCCCTTTCTGCGGCCTTCGCCAGCCCAGGCTCGGCTGCCACCCAGTGGCACAGAACC
GAGGAGCTGCCATTACCCCCCATAGGGGGCAGTGTCTTGTTCCTGCCAGCCTCAGTGTCTTGCT
TCTGCCAGCTCCTTCCCCTAGGAGGGAAGGGTGGGGTGGAACTGGGCACATG
-exemplary 3′ HA for knock-in cassette insertion at E2F4 locus
SEQ ID NO: 18
ATTATATCTACAACCTGGACGAGAGTGAAGGTGTCTGTGACCTCTTTGATGTGCCTGTTCTCAA
CCTCTGACTGACAGGGACATGCCCTGTGTGGCTGGGACCCAGACTGTCTGACCTGGGGGTTGCC
TGGGGACCTCTCCCACCCGACCCCTACAGAGCTTGAGAGCCACAGACGCCTGGCTTCTCCGGCC
TCCCCTCACCGCACAGTTCTGGCCACAGCTCCCGCTCCTGTGCTGGCACTTCTGTGCTCGCAGA
GCAGGGGAACAGGACTCAGCCCCCATCACCGTGGAGCCAAAGTGTTTGCTTCTCCCTTTCTGCG
GCCTTCGCCAGCCCAGGCTCGGCTGCCACCCAGTGGCACAGAACCGAGGAGCTGCCATTACCCC
CCATAGGGGGCAGTGTCTTGTTCCTGCCAGCCTCAGTGTCTTGCTTCTGCCAGCTCCTTCCCCT
AGGAGGGAAGGGTGGGGTGGAACTGGGCACATGCCAGCACCACTTCTAGCTT
-exemplary 3′ HA for knock-in cassette insertion at E2F4 locus
SEQ ID NO: 19
TGACTGACAGGGACATGCCCTGTGTGGCTGGGACCCAGACTGTCTGACCTGGGGGTTGCCTGGG
GACCTCTCCCACCCGACCCCTACAGAGCTTGAGAGCCACAGACGCCTGGCTTCTCCGGCCTCCC
CTCACCGCACAGTTCTGGCCACAGCTCCCGCTCCTGTGCTGGCACTTCTGTGCTCGCAGAGCAG
GGGAACAGGACTCAGCCCCCATCACCGTGGAGCCAAAGTGTTTGCTTCTCCCTTTCTGCGGCCT
TCGCCAGCCCAGGCTCGGCTGCCACCCAGTGGCACAGAACCGAGGAGCTGCCATTACCCCCCAT
AGGGGGCAGTGTCTTGTTCCTGCCAGCCTCAGTGTCTTGCTTCTGCCAGCTCCTTCCCCTAGGA
GGGAAGGGTGGGGTGGAACTGGGCACATGCCAGCACCACTTCTAGCTTCCTTCGCTATCCCCCA
CCCCCTGACCCTCCAGCTCCTCCTGGCCCTCTCACGTGCCCACTTCTGCTGG

[0596] In some embodiments, a donor template comprises a 5′ and/or 3′ homology arm homologous to a region of a KIF11 locus. In some embodiments, a donor template comprises a 5′ homology arm comprising or consisting of the sequence of SEQ ID NO: 20, 21, or 22. In some embodiments, a 5′ homology arm comprises or consists of a sequence that is at least 85%, 90%, 95%, 98% or 99% identical to the sequence of SEQ ID NO: 20, 21, or 22. In some embodiments, a donor template comprises a 3′ homology arm comprising or consisting of the sequence of SEQ ID NO: 23, 24, or 25. In certain embodiments, a 3′ homology arm comprises or consists of a sequence that is at least 85%, 90%, 95%, 98% or 99% identical to the sequence of SEQ ID NO: 23, 24, or 25.

[0597] In some embodiments, a donor template comprises a 5′ homology arm comprising SEQ ID NO: 20, and a 3′ homology arm comprising SEQ ID NO: 23. In some embodiments, a donor template comprises a 5′ homology arm comprising SEQ ID NO: 21, and a 3′ homology arm comprising SEQ ID NO: 24. In some embodiments, a donor template comprises a 5′ homology arm comprising SEQ ID NO: 22, and a 3′ homology arm comprising SEQ ID NO: 25.

-exemplary 5′ HA for knock-in cassette insertion at KIF11 locus
SEQ ID NO: 20
AGAGCAGGGTTTCTTGACAGCAGTGCTATTGGCATTTTAAACTGGATAATTCTTTGTTGTGATG
GGCTTTCCTGTGGAGTGTACTATGTTGGTACACAAGAAAAACAGTGTACTATGTGAATACTCAC
TCAAAGCCAGTAGCACTCCCTGATTGTAACACCAAAAAAGTCTCTCAGCATTGCCAAATGTCCC
CTGTGGCAGCAGAATCACTCCCTGATGAGAACCACTACCCTGGAGTAAAATCTATAACTATGTC
TTAGAAAATAACACAGAAAATTAATATTTCTTTCACTCTACTCCTTCCATTAGTGATCAAATAA
AGAAGGCATTTGGCGCTACTTGCCAAATTGTTGGCTCAAACTTGTGCTGAACCTTTTTTGGTTT
TCTACACTTAAGTTTTTTTGCCTATAACCCAGAGAACTTTGAAAATAGAGTGTAGTTAATGTGT
ATCTAATGTTACTTTGTATTGACTTAATTTACCGGCCTTTAATCCACAGCATAAGAAGTCCCAC
GGCAAGGACAAAGAGAACCGGGGCATCAACACACTGGAACGGTCCAAGGTCGAGGAAACAACCG
AGCACCTGGTCACCAAGAGCAGACTGCCTCTGAGAGCCCAGATCAACCTG
-exemplary 5′ HA for knock-in cassette insertion at KIF11 locus
SEQ ID NO: 21
TTCCTGTGGACTGTACTATGTTGGTAGACAAGAAAAACAGTGTACTATGTGAATACTCACTCAA
AGCCAGTAGCACTCCCTGATTGTAACACCAAAAAAGTCTCTCAGCATTGCCAAATGTCCCCTGT
GGCAGCAGAATCACTCCCTGATGAGAACCACTACCCTGGAGTAAAATCTATAACTATGTCTTAG
AAAATAACACAGAAAATTAATATTTCTTTCACTCTACTCCTTCCATTAGTGATCAAATAAAGAA
GGCATTTGGCGCTACTTGCCAAATTGTTGGCTCAAACTTGTGCTGAACCTTTTTTGGTTTTCTA
CACTTAAGTTTTTTTGCCTATAACCCAGAGAACTTTGAAAATAGAGTGTAGTTAATGTGTATCT
AATGTTACTTTGTATTGAGTTAATTTTCCCGCCTTAAATCCACAGCATAAAAAATCACATGGAA
AAGACAAAGAAAACAGAGGCATTAACACACTGGAGAGGTCTAAAGTGGAAGAAACAACCGAGCA
CCTGGTCACCAAGAGCAGACTGCCTCTGAGAGCCCAGATCAACCTG
-exemplary 5′ HA for knock-in cassette insertion at KIF11 locus
SEQ ID NO: 22
TTAAACTGGATAATTCTTTGTTGTGATGGGCTTTCCTGTGGACTGTACTATGTTGGTACACAAG
AAAAACAGTGTACTATGTGAATACTCACTCAAAGCCAGTAGCACTCCCTGATTGTAACACCAAA
AAAGTCTCTCAGCATTGCCAAATGTCCCCTGTGGCAGCAGAATCACTCCCTGATGAGAACCACT
ACCCTGGAGTAAAATCTATAACTATGTCTTAGAAAATAACACAGAAAATTAATATTTCTTTCAC
TCTACTCCTTCCATTAGTGATCAAATAAAGAAGGCATTTGGCGCTACTTGCCAAATTGTTGGCT
CAAACTTGTGCTGAACCTTTTTTGGTTTTCTACACTTAAGTTTTTTTGCCTATAACCCAGAGAA
CTTTGAAAATAGAGTGTAGTTAATGTGTATCTAATGTTACTTTGTATTGACTTAATTTTCCCGC
CTTAAATCCACAGCATAAAAAATCACATGGAAAAGACAAAGAAAACAGAGGCATCAACACACTG
GAACGGTCCAAGGTCGAGGAAACAACCGAGCACCTGGTCACCAAGAGCAGACTGCCTCTGAGAG
CCCAGATCAACCTG
-exemplary 3′ HA for knock-in cassette insertion at KIF11 locus
SEQ ID NO: 23
AAAAAATCACATGGAAAAGACAAAGAAAACAGAGGCATTAACACACTGGAGAGGTCTAAAGTGG
AAGAAACTACAGAGCACTTGGTTACAAAGAGCAGATTACCTCTGCGAGCCCAGATCAACCTTTA
ATTCACTTGGGGGTTGGCAATTTTATTTTTAAAGAAAACTTAAAAATAAAACCTGAAACCCCAG
AACTTGAGCCTTGTGTATAGATTTTAAAAGAATATATATATCAGCCGGGCGCGGTGGCTCATGC
CTGTAATCCCAGCACTTTGGGAGGCTGAGGCGGGTGGATTGCTTGAGCCCAGGAGTTTGAGACC
AGCCTGGCCAACGTGGCAAAACCTCGTCTCTGTTAAAAATTAGCCGGGCGTGGTGGCACACTCC
TGTAATCCCAGCTACTGGGGAGGCTGAGGCACGAGAATCACTTGAACCCAGGAAGCGGGGTTGC
AGTGAGCCAAAGGTACACCACTACACTCCAGCCTGGGCAACAGAGCAAGACT
-exemplary 3′ HA for knock-in cassette insertion at KIF11 locus
SEQ ID NO: 24
AACTACAGAGCACTTGGCTACATAGAGCAGATTACCTCTGCGAGCCCAGATCAACCTTTAATTC
ACTTGGGGGTTGGCAATTTTATTTTTAAAGAAAACTTAAAAATAAAACCTGAAACCCCAGAACT
TGAGCCTTGTGTATAGATTTTAAAAGAATATATATATCAGCCGGGCGCGGTGGCTCATGCCTGT
AATCCCAGCACTTTGGGAGGCTGAGGCGGGTGGATTGCTTGAGCCCAGGAGTTTGAGACCAGCC
TGGCCAACGTGGCAAAACCTCGTCTCTGTTAAAAATTAGCCGGGCGTGGTGGCACACTCCTGTA
ATCCCAGCTACTGGGGAGGCTGAGGCACGAGAATCACTTGAACCCAGGAAGCGGGGTTGCAGTG
AGCCAAAGGTACACCACTACACTCCAGCCTGGGCAACAGAGCAAGACTCGGTCTCAAAAACAAA
ATTTAAAAAAGATATAAGGCAGTACTGTAAATTCAGTTGAATTTTGATATCT
-exemplary 3′ HA for knock-in cassette insertion at KIF11 locus
SEQ ID NO: 25
ATTAACACACTGGAGAGTTCTGAAGTGGAAGAAACTACAGAGCACTTGGTTACAAAGAGCAGAT
TACCTCTGCGAGCCCAGATCAACCTTTAATTCACTTGGGGGTTGGCAATTTTATTTTTAAAGAA
AACTTAAAAATAAAACCTGAAACCCCAGAACTTGAGCCTTGTGTATAGATTTTAAAAGAATATA
TATATCAGCCGGGCGCGGTGGCTCATGCCTGTAATCCCAGCACTTTGGGAGGCTGAGGCGGGTG
GATTGCTTGAGCCCAGGAGTTTGAGACCAGCCTGGCCAACGTGGCAAAACCTCGTCTCTGTTAA
AAATTAGCCGGGCGTGGTGGCACACTCCTGTAATCCCAGCTACTGGGGAGGCTGAGGCACGAGA
ATCACTTGAACCCAGGAAGCGGGGTTGCAGTGAGCCAAAGGTACACCACTACACTCCAGCCTGG
GCAACAGAGCAAGACTCGGTCTCAAAAACAAAATTTAAAAAAGATATAAGGC

[0598] Inverted Terminal Repeats (ITRs)

[0599] In certain embodiments, a donor template comprises an AAV derived sequence. In certain embodiments, a donor template comprises AAV derived sequences that are typical of an AAV construct, such as cis-acting 5′ and 3′ inverted terminal repeats (ITRs) (See, e.g., B. J. Carter, in “Handbook of Parvoviruses”, ed., P. Tijsser, CRC Press, pp. 155 168 (1990), which is incorporated in its entirety herein by reference). Generally, ITRs are able to form a hairpin. The ability to form a hairpin can contribute to an ITRs ability to self-prime, allowing primase-independent synthesis of a second DNA strand. ITRs also play a role in integration of AAV construct (e.g., a coding sequence) into a genome of a target cell. ITRs can also aid in efficient encapsidation of an AAV construct in an AAV particle.

[0600] In some embodiments, a donor template described herein is included within an rAAV particle (e.g., an AAV6 particle). In some embodiments, an ITR is or comprises about 145 nucleic acids. In some embodiments, all or substantially all of a sequence encoding an ITR is used. In some embodiments, an AAV ITR sequence may be obtained from any known AAV, including presently identified mammalian AAV types. In some embodiments an ITR is an AAV6 ITR.

[0601] An example of an AAV construct employed in the present disclosure is a “cis-acting” construct containing a cargo sequence (e.g., a donor template described herein), in which the donor template is flanked by 5′ or “left” and 3′ or “right” AAV ITR sequences. 5′ and left designations refer to a position of an ITR sequence relative to an entire construct, read left to right, in a sense direction. For example, in some embodiments, a 5′ or left ITR is an ITR that is closest to a target loci promoter (as opposed to a polyadenylation sequence) for a given construct, when a construct is depicted in a sense orientation, linearly. Concurrently, 3′ and right designations refer to a position of an ITR sequence relative to an entire construct, read left to right, in a sense direction. For example, in some embodiments, a 3′ or right ITR is an ITR that is closest to a polyadenylation sequence in a target loci (as opposed to a promoter sequence) for a given construct, when a construct is depicted in a sense orientation, linearly. ITRs as provided herein are depicted in 5′ to 3′ order in accordance with a sense strand. Accordingly, one of skill in the art will appreciate that a 5′ or “left” orientation ITR can also be depicted as a 3′ or “right” ITR when converting from sense to antisense direction. Further, it is well within the ability of one of skill in the art to transform a given sense ITR sequence (e.g., a 5′/left AAV ITR) into an antisense sequence (e.g., 3′/right ITR sequence). One of ordinary skill in the art would understand how to modify a given ITR sequence for use as either a 5′/left or 3′/right ITR, or an antisense version thereof.

[0602] For example, in some embodiments an ITR (e.g., a 5′ ITR) can have a sequence according to SEQ ID NO: 158. In some embodiments, an ITR (e.g., a 3′ ITR) can have a sequence according to SEQ ID NO: 159. In some embodiments, an ITR includes one or more modifications, e.g., truncations, deletions, substitutions or insertions, as is known in the art. In some embodiments, an ITR comprises fewer than 145 nucleotides, e.g., 127, 130, 134 or 141 nucleotides. For example, in some embodiments, an ITR comprises 110, 111, 112, 113, 114, 115, 116, 117, 118, 119, 120, 121, 122, 123, 124, 125, 126, 127, 128, 129, 130, 131, 132, 133, 134, 135, 136, 137, 138, 139, 140, 141, 142, 143 144, or 145 nucleotides.

[0603] A non-limiting example of 5′ AAV ITR sequences includes SEQ ID NO: 158. A non-limiting example of 3′ AAV ITR sequences includes SEQ ID NO: 159. In some embodiments, the 5′ and a 3′ AAV ITRs (e.g., SEQ ID NO: 158 and 159) flank a donor template described herein (e.g., a donor template comprising a 5′HA, a knock-in cassette, and a 3′ HA). The ability to modify ITR sequences is within the skill of the art. (See, e.g., texts such as Sambrook et al. “Molecular Cloning. A Laboratory Manual”, 2d ed., Cold Spring Harbor Laboratory, New York (1989); and K. Fisher et al., J Virol., 70:520 532 (1996), each of which is incorporated in its entirety herein by reference). In some embodiments, a 5′ ITR sequence is at least 85%, 90%, 95%, 98% or 99% identical to a 5′ ITR sequence represented by SEQ ID NO: 158. In some embodiments, a 3′ ITR sequence is at least 85%, 90%, 95%, 98% or 99% identical to a 3′ ITR sequence represented by SEQ ID NO: 159.

exemplary 5′ ITR for knock-in cassette insertion
SEQ ID NO: 158
CCTGCAGGCAGCTGCGCGCTCGCTCGCTCACTGAG
GCCGCCCGGGCAAAGCCCGGGCGTCGGGCGACCTT
TGGTCGCCCGGCCTCAGTGAGCGAGCGAGCGCGCA
GAGAGGGAGTGGCCAACTCCATCACTAGGGGTTCC
T
exemplary 3′ ITR for knock-in cassette insertion
SEQ ID NO: 159
AGGAACCCCTAGTGATGGAGTTGGCCACTCCCTCT
CTGCGCGCTCGCTCGCTCACTGAGGCCGGGCGACC
AAAGGTCGCCCGACGCCCGGGCTTTGCCCGGGCGG
CCTCAGTGAGCGAGCGAGCGCGCAGCTGCCTGCAG
G

[0604] Flanking Untranslated Regions, 5′ UTRs and 3′ UTRs

[0605] In some embodiments, a knock-in cassette described herein includes all or a portion of an untranslated region (UTR), such as a 5′ UTR and/or a 3′ UTR. UTRs of a gene are transcribed but not translated. A 5′ UTR starts at a transcription start site and continues to the start codon but does not include the start codon. A 3′ UTR starts immediately following the stop codon and continues until the transcriptional termination signal. The regulatory and/or control features of a UTR can be incorporated into any of the knock-in cassettes described herein to enhance or otherwise modulate the expression of an essential target gene loci and/or a cargo sequence.

[0606] Natural 5′ UTRs include a sequence that plays a role in translation initiation. In some embodiments, a 5′ UTR comprises sequences, like Kozak sequences, which are commonly known to be involved in the process by which the ribosome initiates translation of many genes. Kozak sequences have the consensus sequence CCR(A/G)CCAUGG, where R is a purine (A or G) three bases upstream of the start codon (AUG), and the start codon is followed by another “G”. The 5′ UTRs have also been known to form secondary structures that are involved in elongation factor binding. Non-limiting examples of 5′ UTRs include those from the following genes: albumin, serum amyloid A, Apolipoprotein A/B/E, transferrin, alpha fetoprotein, erythropoietin, and Factor VIII.

[0607] In some embodiments, a UTR may comprise a non-endogenous regulatory region. In some embodiments, a UTR that comprises a non-endogenous regulatory region is a 3′ UTR. In some embodiments, a UTR that comprises a non-endogenous regulatory region is a 5′ UTR. In some embodiments, a non-endogenous regulatory region may be a target of at least one inhibitory nucleic acid. In some embodiments, an inhibitory nucleic acid inhibits expression and/or activity of a target gene. In some embodiments, an inhibitory nucleic acid is a short interfering RNA (siRNA), a short hairpin RNA (shRNA), a microRNA (miRNA), an antisense oligonucleotide, a guide RNA (gRNA), or a ribozyme. In some embodiments, an inhibitory nucleic acid is an endogenous molecule. In some embodiments, an inhibitory nucleic acid is a non-endogenous molecule. In some embodiments, an inhibitory nucleic acid displays a tissue specific expression pattern. In some embodiments, an inhibitory nucleic acid displays a cell specific expression pattern.

[0608] In some embodiments, a knock-in cassette may comprise more than one non-endogenous regulatory regions, e.g., two, three, four, five, six, seven, eight, nine, or ten regulatory regions. In some embodiments, a knock-in cassette may comprise four non-endogenous regulatory regions. In some embodiments, a construct may comprise more than one non-endogenous regulatory regions, wherein at least one of the more than one non-endogenous regulatory regions are not the same as at least one of the other non-endogenous regulatory regions.

[0609] In some embodiments, a 3′ UTR is found immediately 3′ to the stop codon of a gene of interest. In some embodiments, a 3′ UTR from an mRNA that is transcribed by a target cell can be included in any knock-in cassette described herein. In some embodiments, a 3′ UTR is derived from an endogenous target loci and may include all or part of the endogenous sequence. In some embodiments, a 3′ UTR sequence is at least 85%, 90%, 95% or 98% identical to the sequence of SEQ ID NO: 26.

exemplary 3′ UTR for knock-in cassette insertion
SEQ ID NO: 26
GCGGCCGCGTCGAGTCTAGAGGGCCCGTTTAAACC
CGCTGATCAGCCTCGA

[0610] Polyadenylation Sequences

[0611] In some embodiments, a knock-in cassette construct provided herein can include a polyadenylation (poly(A)) signal sequence. Most nascent eukaryotic mRNAs possess a poly(A) tail at their 3′ end, which is added during a complex process that includes cleavage of the primary transcript and a coupled polyadenylation reaction driven by the poly(A) signal sequence (see, e.g., Proudfoot et al., Cell 108:501-512, 2002, which is incorporated herein by reference in its entirety). A poly(A) tail confers mRNA stability and transferability (Molecular Biology of the Cell, Third Edition by B. Alberts et al., Garland Publishing, 1994, which is incorporated herein by reference in its entirety). In some embodiments, a poly(A) signal sequence is positioned 3′ to a coding sequence.

[0612] As used herein, “polyadenylation” refers to the covalent linkage of a polyadenylyl moiety, or its modified variant, to a messenger RNA molecule. In eukaryotic organisms, most messenger RNA (mRNA) molecules are polyadenylated at the 3′ end. A 3′ poly(A) tail is a long sequence of adenine nucleotides (e.g., 50, 60, 70, 100, 200, 500, 1000, 2000, 3000, 4000, or 5000) added to the pre-mRNA through the action of an enzyme, polyadenylate polymerase. In some embodiments, a poly(A) tail is added onto transcripts that contain a specific sequence, e.g., a polyadenylation (or poly(A)) signal. A poly(A) tail and associated proteins aid in protecting mRNA from degradation by exonucleases. Polyadenylation also plays a role in transcription termination, export of the mRNA from the nucleus, and translation. Polyadenylation typically occurs in the nucleus immediately after transcription of DNA into RNA, but also can occur later in the cytoplasm. After transcription has been terminated, an mRNA chain is cleaved through the action of an endonuclease complex associated with RNA polymerase. A cleavage site is usually characterized by the presence of the base sequence AAUAAA near the cleavage site. After the mRNA has been cleaved, adenosine residues are added to the free 3′ end at the cleavage site.

[0613] As used herein, a “poly(A) signal sequence” or “polyadenylation signal sequence” is a sequence that triggers the endonuclease cleavage of an mRNA and the addition of a series of adenosines to the 3′ end of the cleaved mRNA.

[0614] There are several poly(A) signal sequences that can be used, including those derived from bovine growth hormone (bGH) (Woychik et al., Proc. Natl. Acad Sci. US.A. 81(13):3944-3948, 1984; U.S. Pat. No. 5,122,458, each of which is incorporated herein by reference in its entirety), mouse-β-globin, mouse-α-globin (Orkin et al., EMBO J 4(2):453-456, 1985; Thein et al., Blood 71(2):313-319, 1988, each of which is incorporated herein by reference in its entirety), human collagen, polyoma virus (Batt et al., Mol. Cell Biol. 15(9):4783-4790, 1995, which is incorporated herein by reference in its entirety), the Herpes simplex virus thymidine kinase gene (HSV TK), IgG heavy-chain gene polyadenylation signal (US 2006/0040354, which is incorporated herein by reference in its entirety), human growth hormone (hGH) (Szymanski et al., Mol. Therapy 15(7):1340-1347, 2007, which is incorporated herein by reference in its entirety), the group comprising a SV40 poly(A) site, such as the SV40 late and early poly(A) site (Schek et al., Mol. Cell Biol. 12(12):5386-5393, 1992, which is incorporated herein by reference in its entirety).

[0615] The poly(A) signal sequence can be AATAAA. The AATAAA sequence may be substituted with other hexanucleotide sequences with homology to AATAAA and that are capable of signaling polyadenylation, including ATTAAA, AGTAAA, CATAAA, TATAAA, GATAAA, ACTAAA, AATATA, AAGAAA, AATAAT, AAAAAA, AATGAA, AATCAA, AACAAA, AATCAA, AATAAC, AATAGA, AATTAA, or AATAAG (see, e.g., WO 06/12414, which is incorporated herein by reference in its entirety).

[0616] In some embodiments, a poly(A) signal sequence can be a synthetic polyadenylation site (see, e.g., the pCl-neo expression construct of Promega that is based on Levitt el al., Genes Dev. 3(7):1019-1025, 1989, which is incorporated herein by reference in its entirety). In some embodiments, a poly(A) signal sequence is the polyadenylation signal of soluble neuropilin-1 (sNRP) (AAATAAAATACGAAATG) (see, e.g., WO 05/073384, which is incorporated herein by reference in its entirety). In some embodiments, a poly(A) signal sequence comprises or consists of the SV40 poly(A) site. In some embodiments, a poly(A) signal sequence comprises or consists of SEQ ID NO: 27. In some embodiments, a poly(A) signal sequence comprises or consists of bGHpA. In some embodiments, a poly(A) signal sequence comprises or consists of SEQ ID NO: 28. Additional examples of poly(A) signal sequences are known in the art. In some embodiments, a poly(A) sequence is at least 85%, 90%, 95%, 98% or 99% identical to the sequence of SEQ ID NOs: 27 or 28.

exemplary SV40 poly(A) signal sequence
SEQ ID NO: 27
AACTTGTTTATTGCAGCTTATAATGGTTACAAATA
AAGCAATAGCATCACAAATTTCACAAATAAAGCAT
TTTTTTCACTGCATTCTAGTTGTGGTTTGTCCAAA
CTCATCAATGTATCTTA
exemplary bGH poly(A) signal sequence
SEQ ID NO: 28
CTGTGCCTTCTAGTTGCCAGCCATCTGTTGTTTGC
CCCTCCCCCGTGCCTTCCTTGACCCTGGAAGGTGC
CACTCCCACTGTCCTTTCCTAATAAAATGAGGAAA
TTGCATCGCATTGTCTGAGTAGGTGTCATTCTATT
CTGGGGGGTGGGGTGGGGCAGGACAGCAAGGGGGA
GGATTGGGAAGACAATAGCAGGCATGCTGGGGATG
CGGTGGGCTCTATGG

[0617] IRES and 2A Elements

[0618] in some embodiments, the knock-in cassette comprises a regulatory element that enables expression of the gene product encoded by the essential gene and the gene product of interest as separate gene products, e.g., an IRES or 2A element located between the exogenous coding sequence or partial coding sequence of the essential gene and the exogenous coding sequence for the gene product of interest.

[0619] In some embodiments, a knock-in cassette may comprise multiple gene products of interest (e.g., at least two gene products of interest). In some embodiments, gene products of interest may be separated by a regulatory element that enables expression of the at least two gene products of interest as more than one gene product, e.g., an IRES or 2A element located between the at least two coding sequences, facilitating creation of at least two peptide products.

[0620] Internal Ribosome Entry Site (IRES) elements are one type of regulatory element that are commonly used for this purpose. As is well known in the art, IRES elements allow for initiation of translation from an internal region of the mRNA and hence expression of two separate proteins from the same mRNA transcript. IRES was originally discovered in poliovirus RNA, where it promotes translation of the viral genome in eukaryotic cells. Since then, a variety of IRES sequences have been discovered—many from viruses, but also some from cellular mRNAs, e.g., see Mokrejs et al., Nucleic Acids Res. 2006; 34 (Database issue):D125-D130.

[0621] 2A elements are another type of regulatory element that are commonly used for this purpose. These 2A elements encode so-called “self-cleaving” 2A peptides which are short peptides (about 20 amino acids) that were first discovered in picornaviruses. The term “self-cleaving” is not entirely accurate, as these peptides are thought to function by making the ribosome skip the synthesis of a peptide bond at the C-terminus of a 2A element, leading to separation between the end of the 2A sequence and the next peptide downstream. The “cleavage” occurs between the Glycine (G) and Proline (P) residues found on the C-terminus meaning the upstream cistron, i.e., protein encoded by the essential gene will have a few additional residues from the 2A peptide added to the end, while the downstream cistron, i.e., gene product of interest will start with the Proline (P).

[0622] Table 2 below lists the four commonly used 2A peptides (an optional GSG sequence is sometimes added to the N-terminal end of the peptide to improve cleavage efficiency). There are many potential 2A peptides that may be suitable for methods and compositions described herein (see e.g., Luke et al., Occurrence, function and evolutionary origins of ‘2A-like’ sequences in virus genomes. J Gen Virol. 2008). Those skilled in the art know that the choice of specific 2A peptide for a particular knock-in cassette will ultimately depend on a number of factors such as cell type or experimental conditions. Those skilled in the art will recognize that nucleotide sequences encoding specific 2A peptides can vary while still encoding a peptide suitable for inducing a desired cleavage event.

TABLE 2
Exemplary 2A peptide sequences

| SEQ | 2A | |
|---|---|---|
| ID | pep- | |
| NO: | tide | Sequence |
| 29 | T2A | EGRGSLLTCGDVEENPGP |
| 30 | P2A | ATNFSLLKQAGDVEENPGP |
| 31 | E2A | QCTNYALLKLAGDVESNPGP |
| 32 | F2A | VKQTLNFDLLKLAGDVESNPGP |
| 33 | T2A | GAGGGCAGAGGAAGTCTTCTAACATGCGGTGAGGTGGAGG |
| | | AGAATCCTGGCCCG |
| 34 | P2A | GGAAGCGGAGCTACTAACTTCAGCCTGCTGAAGCAGGCTG |
| | | GAGACGTGGAGGAGAACCCTGGACCT |
| 35 | E2A | CAGTGTACTAATTATGCTCTCTTGAAATTGGCTGGAGATG |
| | | TTGAGAGCAACCCTGGACCT |
| 36 | F2A | GTGAAACAGACTTTGAATTTTGACCTTCTCAAGTTGGCGG |
| | | GAGACGTGGAGTCCAACCCTGGACCT |
| 37 | IRES | CCCCTCTCCCTCCCCCCCCCCTAACGTTACTGGCCGAAGC |
| | | CGCTTGGAATAAGGCCGGTGTGCGTTTGTCTATATGTTAT |
| | | TTTCCACCATATTGCCGTCTTTTGGCAATGTGAGGGCCCG |
| | | GAAACCTGGCCCTGTCTTCTTGACGAGCATTCCTAGGGGT |
| | | CTTTCCCCTCTCGCCAAAGGAATGCAAGGTCTGTTGAATG |
| | | TCGTGAAGGAAGCAGTTCCTCTGGAAGCTTCTTGAAGACA |
| | | AACAACGTCTGTAGCGACCCTTTGCAGGCAGCGGAACCCC |
| | | CCACCTGGCGACAGGTGCCTCTGCGGCCAAAAGCCACGTG |
| | | TATAAGATACACCTGCAAAGGCGGCACAACCCCAGTGCCA |
| | | CGTTGTGAGTTGGATAGTTGTGGAAAGAGTCAAATGGCTC |
| | | TCCTCAAGCGTATTCAACAAGGGGCTGAAGGATGCCCAGA |
| | | AGGTACCCCATTGTATGGGATCTGATCTGGGGCCTCGGTG |
| | | CACATGCTTTAGATGTGTTTAGTCGAGGTTAAAAAAACGT |
| | | CTAGGCCCCCCGAACCACGGGGACGTGGTTTTCCTTTGAA |
| | | AAACACGATGATAA |

[0623] Essential Genes

[0624] An essential gene can be any gene that is essential for the survival and/or the proliferation of the cell. In some embodiments, an essential gene is a housekeeping gene that is essential for survival of all cell types, e.g., a gene listed in Table 3. See also other housekeeping genes discussed in Eisenberg, Trends in Gen, 2014; 30(3):119-20 and Moein et al., Adv, Biomed Res. 2017; 6:15, Additional genes that are essential for various cell types, including iPSCs/ESCs, are listed in Table 4 (see also the essential genes discussed in Yilmaz et al., Nat. Cell Biol. 2018; 20:610-619 the entire contents of which are incorporated herein by reference).

[0625] In some embodiments the essential gene is GAPDH and the DNA nuclease causes a break in exon 9, e.g., a double-strand break. In some embodiments the essential gene is TBP and the DNA nuclease causes a break in exon 7, or exon 8, e.g., a double-strand break. In some embodiments the essential gene is E2F4 and the DNA nuclease causes a break in exon 10, e.g., a double-strand break. In some embodiments the essential gene is G6PD and the DNA nuclease causes a break in exon 13, e.g., a double-strand break. In some embodiments the essential gene is KIF11 and the DNA nuclease causes a break in exon 22, e.g., a double-strand break.

TABLE 3
Exemplary housekeeping genes

| Ensembl ID | Gene Symbol | Ensembl ID | Gene Symbol |
|---|---|---|---|
| ENSG00000075624 | ACTB | ENSG00000231500 | RPS18 |
| ENSG00000116459 | ATP5F1 | ENSG00000112592 | TBP |
| ENSG00000166710 | B2M | ENSG00000072274 | TFRC |
| ENSG00000111640 | GAPDH | ENSG00000164924 | YWHAZ |
| ENSG00000169919 | GUSB | ENSG00000089157 | RPLP0 |
| ENSG00000165704 | HPRT1 | ENSG00000142541 | RPL13A |
| ENSG00000102144 | PGK1 | ENSG00000147604 | RPL7 |
| ENSG00000196262 | PPIA | ENSG00000205250 | E2F4 |
| ENSG00000138160 | KIF11 | ENSG00000160211 | G6PD |

TABLE 4
Additional exemplary essential genes

| Ensembl ID | Gene Symbol | Ensembl ID | Gene Symbol |
|---|---|---|---|
| ENSG00000111704 | NANOG | ENSG00000181449 | SOX2 |
| ENSG00000179059 | ZFP42 | ENSG00000136997 | MYC |
| ENSG00000136826 | KLF4 | ENSG00000175166 | PSMD2 |
| ENSG00000118655 | DCLRE1B | ENSG00000070614 | NDST1 |
| ENSG00000172409 | CLP1 | ENSG00000115484 | CCT4 |
| ENSG00000082898 | XPO1 | ENSG00000100890 | KIAA0391 |
| ENSG00000114867 | EIF4G1 | ENSG00000149474 | CSRP2BP |
| ENSG00000115866 | DARS | ENSG00000102738 | MRPS31 |
| ENSG00000204628 | GNB2L1 | ENSG00000136104 | RNASEH2B |
| ENSG00000198242 | RPL23A | ENSG00000106246 | PTCD1 |
| ENSG00000158526 | TSR2 | ENSG00000248919 | ATP5J2-PTCD1 |
| ENSG00000125450 | NUP85 | ENSG00000138663 | COPS4 |
| ENSG00000134371 | CDC73 | ENSG00000115368 | WDR75 |
| ENSG00000164941 | INTS8 | ENSG00000128564 | VGF |
| ENSG00000055483 | USP36 | ENSG00000128191 | DGCR8 |
| ENSG00000258366 | RTEL1 | ENSG00000008294 | SPAG9 |
| ENSG00000188846 | RPL14 | ENSG00000131475 | VPS25 |
| ENSG00000247626 | MARS2 | ENSG00000105523 | FAM83E |
| ENSG00000095787 | WAC | ENSG00000172269 | DPAGT1 |
| ENSG00000108094 | CUL2 | ENSG00000170312 | CDK1 |
| ENSG00000185946 | RNPC3 | ENSG00000104131 | EIF3J |
| ENSG00000154473 | BUB3 | ENSG00000150753 | CCT5 |
| ENSG00000204394 | VARS | ENSG00000140443 | IGF1R |
| ENSG00000103051 | COG4 | ENSG00000010292 | NCAPD2 |
| ENSG00000104738 | MCM4 | ENSG00000171763 | SPATA5L1 |
| ENSG00000117222 | RBBP5 | ENSG00000180098 | TRNAU1AP |
| ENSG00000082516 | GEMIN5 | ENSG00000168374 | ARF4 |
| ENSG00000100162 | CENPM | ENSG00000173812 | EIF1 |
| ENSG00000141456 | PELP1 | ENSG00000100554 | ATP6V1D |
| ENSG00000137807 | KIF23 | ENSG00000072756 | TRNT1 |
| ENSG00000112685 | EXOC2 | ENSG00000135372 | NAT10 |
| ENSG00000125995 | ROMO1 | ENSG00000178394 | HTR1A |
| ENSG00000136891 | TEX10 | ENSG00000128272 | ATF4 |
| ENSG00000173113 | TRMT112 | ENSG00000204070 | SYS1 |
| ENSG00000075914 | EXOSC7 | ENSG00000137815 | RTF1 |
| ENSG00000119523 | ALG2 | ENSG00000198026 | ZNF335 |
| ENSG00000244038 | DDOST | ENSG00000117410 | ATP6V0B |
| ENSG00000108175 | ZMIZ1 | ENSG00000112739 | PRPF4B |
| ENSG00000129691 | ASH2L | ENSG00000129347 | KRI1 |
| ENSG00000183207 | RUVBL2 | ENSG00000221818 | EBF2 |
| ENSG00000055044 | NOP58 | ENSG00000198431 | TXNRD1 |
| ENSG00000204315 | FKBPL | ENSG00000104979 | C19orf53 |
| ENSG00000187522 | HSPA14 | ENSG00000136709 | WDR33 |
| ENSG00000169375 | SIN3A | ENSG00000149100 | EIF3M |
| ENSG00000143748 | NVL | ENSG00000125835 | SNRPB |
| ENSG00000021776 | AQR | ENSG00000116698 | SMG7 |
| ENSG00000132467 | UTP3 | ENSG00000087586 | AURKA |
| ENSG00000087470 | DNM1L | ENSG00000169230 | PRELID1 |
| ENSG00000130811 | EIF3G | ENSG00000143799 | PARP1 |
| ENSG00000180198 | RCC1 | ENSG00000146731 | CCT6A |
| ENSG00000101407 | TTI1 | ENSG00000163877 | SNIP1 |
| ENSG00000116455 | WDR77 | ENSG00000215421 | ZNF407 |
| ENSG00000135763 | URB2 | ENSG00000197724 | PHF2 |
| ENSG00000133316 | WDR74 | ENSG00000172590 | MRPL52 |
| ENSG00000189091 | SF3B3 | ENSG00000175203 | DCTN2 |
| ENSG00000109917 | ZNF259 | ENSG00000149273 | RPS3 |
| ENSG00000130640 | TUBGCP2 | ENSG00000204822 | MRPL53 |
| ENSG00000011376 | LARS2 | ENSG00000109775 | UFSP2 |
| ENSG00000135249 | RINT1 | ENSG00000165733 | BMS1 |
| ENSG00000126883 | NUP214 | ENSG00000104671 | DCTN6 |
| ENSG00000163510 | CWC22 | ENSG00000175224 | ATG13 |
| ENSG00000101138 | CSTF1 | ENSG00000142541 | RPL13A |
| ENSG00000104221 | BRF2 | ENSG00000173805 | HAP1 |
| ENSG00000125630 | POLR1B | ENSG00000115750 | TAF1B |
| ENSG00000083896 | YTHDC1 | ENSG00000165688 | PMPCA |
| ENSG00000105726 | ATP13A1 | ENSG00000159720 | ATP6V0D1 |
| ENSG00000105618 | PRPF31 | ENSG00000074201 | CLNS1A |
| ENSG00000117748 | RPA2 | ENSG00000158417 | EIF5B |
| ENSG00000143294 | PRCC | ENSG00000196588 | MKL1 |
| ENSG00000156239 | N6AMT1 | ENSG00000138614 | VWA9 |
| ENSG00000143384 | MCL1 | ENSG00000124571 | XPO5 |
| ENSG00000113407 | TARS | ENSG00000198000 | NOL8 |
| ENSG00000086589 | RBM22 | ENSG00000181991 | MRPS11 |
| ENSG00000133119 | RFC3 | ENSG00000149823 | VPS51 |
| ENSG00000052749 | RRP12 | ENSG00000151348 | EXT2 |
| ENSG00000103047 | TANGO6 | ENSG00000162396 | PARS2 |
| ENSG00000142751 | GPN2 | ENSG00000204843 | DCTN1 |
| ENSG00000101057 | MYBL2 | ENSG00000177302 | TOP3A |
| ENSG00000176915 | ANKLE2 | ENSG00000142684 | ZNF593 |
| ENSG00000071127 | WDR1 | ENSG00000074800 | ENO1 |
| ENSG00000106344 | RBM28 | ENSG00000167513 | CDT1 |
| ENSG00000100316 | RPL3 | ENSG00000141101 | NOB1 |
| ENSG00000139131 | YARS2 | ENSG00000047315 | POLR2B |
| ENSG00000182831 | C16orf72 | ENSG00000131966 | ACTR10 |
| ENSG00000167325 | RRM1 | ENSG00000115875 | SRSF7 |
| ENSG00000172262 | ZNF131 | ENSG00000186141 | POLR3C |
| ENSG00000007168 | PAFAH1B1 | ENSG00000108424 | KPNB1 |
| ENSG00000117174 | ZNHIT6 | ENSG00000111845 | PAK1IP1 |
| ENSG00000196497 | IPO4 | ENSG00000148832 | PAOX |
| ENSG00000188566 | NDOR1 | ENSG00000156017 | C9orf41 |
| ENSG00000183091 | NEB | ENSG00000198901 | PRC1 |
| ENSG00000011304 | PTBP1 | ENSG00000134001 | EIF2S1 |
| ENSG00000109805 | NCAPG | ENSG00000146918 | NCAPG2 |
| ENSG00000123154 | WDR83 | ENSG00000144713 | RPL32 |
| ENSG00000147416 | ATP6V1B2 | ENSG00000185122 | HSF1 |
| ENSG00000163961 | RNF168 | ENSG00000167658 | EEF2 |
| ENSG00000163811 | WDR43 | ENSG00000164190 | NIPBL |
| ENSG00000143624 | INTS3 | ENSG00000163902 | RPN1 |
| ENSG00000101161 | PRPF6 | ENSG00000244045 | TMEM199 |
| ENSG00000130726 | TRIM28 | ENSG00000143476 | DTL |
| ENSG00000165494 | PCF11 | ENSG00000149503 | INCENP |
| ENSG00000053900 | ANAPC4 | ENSG00000071243 | ING3 |
| ENSG00000168255 | POLR2J3 | ENSG00000186073 | C15orf41 |
| ENSG00000129534 | MIS18BP1 | ENSG00000088836 | SLC4A11 |
| ENSG00000164754 | RAD21 | ENSG00000136273 | HUS1 |
| ENSG00000120158 | RCL1 | ENSG00000005007 | UPF1 |
| ENSG00000161016 | RPL8 | ENSG00000070010 | UFD1L |
| ENSG00000030066 | NUP160 | ENSG00000106263 | EIF3B |
| ENSG00000099624 | ATP5D | ENSG00000213024 | NUP62 |
| ENSG00000116120 | FARSB | ENSG00000067191 | CACNB1 |
| ENSG00000115233 | PSMD14 | ENSG00000179091 | CYC1 |
| ENSG00000086504 | MRPL28 | ENSG00000113312 | TTC1 |
| ENSG00000160752 | FDPS | ENSG00000085831 | TTC39A |
| ENSG00000049541 | RFC2 | ENSG00000118197 | DDX59 |
| ENSG00000148688 | RPP30 | ENSG00000134871 | COL4A2 |
| ENSG00000114573 | ATP6V1A | ENSG00000088986 | DYNLL1 |
| ENSG00000086200 | IPO11 | ENSG00000138778 | CENPE |
| ENSG00000119720 | NRDE2 | ENSG00000106244 | PDAP1 |
| ENSG00000058262 | SEC61A1 | ENSG00000177600 | RPLP2 |
| ENSG00000073111 | MCM2 | ENSG00000112081 | SRSF3 |
| ENSG00000138160 | KIF11 | ENSG00000100413 | POLR3H |
| ENSG00000215193 | PEX26 | ENSG00000172508 | CARNS1 |
| ENSG00000161057 | PSMC2 | ENSG00000147123 | NDUFB11 |
| ENSG00000187514 | PTMA | ENSG00000119953 | SMNDC1 |
| ENSG00000135829 | DHX9 | ENSG00000111640 | GAPDH |
| ENSG00000058729 | RIOK2 | ENSG00000117899 | MESDC2 |
| ENSG00000110330 | BIRC2 | ENSG00000075624 | ACTB |
| ENSG00000141759 | TXNL4A | ENSG00000163166 | IWS1 |
| ENSG00000166986 | MARS | ENSG00000114503 | NCBP2 |
| ENSG00000153774 | CFDP1 | ENSG00000198522 | GPN1 |
| ENSG00000130177 | CDC16 | ENSG00000099899 | TRMT2A |
| ENSG00000241553 | ARPC4 | ENSG00000181544 | FANCB |
| ENSG00000132604 | TERF2 | ENSG00000136982 | DSCC1 |
| ENSG00000114982 | KANSL3 | ENSG00000068366 | ACSL4 |
| ENSG00000213780 | GTF2H4 | ENSG00000062716 | VMP1 |
| ENSG00000139343 | SNRPF | ENSG00000111802 | TDP2 |
| ENSG00000101189 | MRGBP | ENSG00000185627 | PSMD13 |
| ENSG00000079246 | XRCC5 | ENSG00000020426 | MNAT1 |
| ENSG00000196943 | NOP9 | ENSG00000113734 | BNIP1 |
| ENSG00000122965 | RBM19 | ENSG00000102241 | HTATSF1 |
| ENSG00000132383 | RPA1 | ENSG00000160789 | LMNA |
| ENSG00000094880 | CDC23 | ENSG00000062822 | POLD1 |
| ENSG00000213639 | PPP1CB | ENSG00000168944 | CEP120 |
| ENSG00000109911 | ELP4 | ENSG00000139718 | SETD1B |
| ENSG00000180957 | PITPNB | ENSG00000132792 | CTNNBL1 |
| ENSG00000122257 | RBBP6 | ENSG00000173540 | GMPPB |
| ENSG00000173145 | NOC3L | ENSG00000128789 | PSMG2 |
| ENSG00000179115 | FARSA | ENSG00000196365 | LONP1 |
| ENSG00000105171 | POP4 | ENSG00000160214 | RRP1 |
| ENSG00000148303 | RPL7A | ENSG00000179041 | RRS1 |
| ENSG00000167508 | MVD | ENSG00000143106 | PSMA5 |
| ENSG00000115541 | HSPE1 | ENSG00000168411 | RFWD3 |
| ENSG00000170445 | HARS | ENSG00000073584 | SMARCE1 |
| ENSG00000168496 | FEN1 | ENSG00000175334 | BANF1 |
| ENSG00000141367 | CLTC | ENSG00000077152 | UBE2T |
| ENSG00000087191 | PSMC5 | ENSG00000173611 | SCAI |
| ENSG00000163159 | VPS72 | ENSG00000171720 | HDAC3 |
| ENSG00000130741 | EIF2S3 | ENSG00000182197 | EXT1 |
| ENSG00000168495 | POLR3D | ENSG00000114346 | ECT2 |
| ENSG00000071894 | CPSF1 | ENSG00000124214 | STAU1 |
| ENSG00000058600 | POLR3E | ENSG00000126254 | RBM42 |
| ENSG00000100726 | TELO2 | ENSG00000127184 | COX7C |
| ENSG00000165501 | LRR1 | ENSG00000174276 | ZNHIT2 |
| ENSG00000113575 | PPP2CA | ENSG00000177971 | IMP3 |
| ENSG00000116922 | C1orf109 | ENSG00000104872 | PIH1D1 |
| ENSG00000073712 | FERMT2 | ENSG00000132155 | RAF1 |
| ENSG00000174437 | ATP2A2 | ENSG00000163872 | YEATS2 |
| ENSG00000176407 | KCMF1 | ENSG00000119906 | FAM178A |
| ENSG00000140525 | FANCI | ENSG00000217930 | PAM16 |
| ENSG00000101182 | PSMA7 | ENSG00000197498 | RPF2 |
| ENSG00000130204 | TOMM40 | ENSG00000130348 | QRSL1 |
| ENSG00000239306 | RBM14 | ENSG00000147536 | GINS4 |
| ENSG00000248643 | RBM14-RBM4 | ENSG00000174748 | RPL15 |
| ENSG00000172113 | NME6 | ENSG00000159147 | DONSON |
| ENSG00000136448 | NMT1 | ENSG00000157593 | SLC35B2 |
| ENSG00000186166 | CCDC84 | ENSG00000181938 | GINS3 |
| ENSG00000166233 | ARIH1 | ENSG00000187446 | CHP1 |
| ENSG00000111877 | MCM9 | ENSG00000070371 | CLTCL1 |
| ENSG00000204316 | MRPL38 | ENSG00000096063 | SRPK1 |
| ENSG00000101868 | POLA1 | ENSG00000141564 | RPTOR |
| ENSG00000107951 | MTPAP | ENSG00000108474 | PIGL |
| ENSG00000039650 | PNKP | ENSG00000187741 | FANCA |
| ENSG00000123064 | DDX54 | ENSG00000213465 | ARL2 |
| ENSG00000183955 | SETD8 | ENSG00000117593 | DARS2 |
| ENSG00000138107 | ACTR1A | ENSG00000171863 | RPS7 |
| ENSG00000244005 | NFS1 | ENSG00000117395 | EBNA1BP2 |
| ENSG00000188986 | NELFB | ENSG00000111142 | METAP2 |
| ENSG00000018699 | TTC27 | ENSG00000113272 | THG1L |
| ENSG00000167112 | TRUB2 | ENSG00000117360 | PRPF3 |
| ENSG00000100393 | EP300 | ENSG00000221978 | CCNL2 |
| ENSG00000101639 | CEP192 | ENSG00000163832 | ELP6 |
| ENSG00000126461 | SCAF1 | ENSG00000108852 | MPP2 |
| ENSG00000172171 | TEFM | ENSG00000175832 | ETV4 |
| ENSG00000135913 | USP37 | ENSG00000185359 | HGS |
| ENSG00000135624 | CCT7 | ENSG00000120705 | ETF1 |
| ENSG00000100804 | PSMB5 | ENSG00000108384 | RAD51C |
| ENSG00000175792 | RUVBL1 | ENSG00000036257 | CUL3 |
| ENSG00000183431 | SF3A3 | ENSG00000152382 | TADA1 |
| ENSG00000108773 | KAT2A | ENSG00000114742 | WDR48 |
| ENSG00000100949 | RABGGTA | ENSG00000214026 | MRPL23 |
| ENSG00000151503 | NCAPD3 | ENSG00000105671 | DDX49 |
| ENSG00000111880 | RNGTT | ENSG00000104731 | KLHDC4 |
| ENSG00000168883 | USP39 | ENSG00000010256 | UQCRC1 |
| ENSG00000151461 | UPF2 | ENSG00000154743 | TSEN2 |
| ENSG00000105486 | LIG1 | ENSG00000178896 | EXOSC4 |
| ENSG00000111300 | NAA25 | ENSG00000168393 | DTYMK |
| ENSG00000144559 | TAMM41 | ENSG00000035928 | RFC1 |
| ENSG00000137574 | TGS1 | ENSG00000048707 | VPS13D |
| ENSG00000172273 | HINFP | ENSG00000154832 | CXXC1 |
| ENSG00000133112 | TPT1 | ENSG00000130985 | UBA1 |
| ENSG00000167986 | DDB1 | ENSG00000065150 | IPO5 |
| ENSG00000125319 | C17orf53 | ENSG00000161800 | RACGAP1 |
| ENSG00000113161 | HMGCR | ENSG00000142534 | RPS11 |
| ENSG00000100941 | PNN | ENSG00000136003 | ISCU |
| ENSG00000139697 | SBNO1 | ENSG00000065000 | AP3D1 |
| ENSG00000135336 | ORC3 | ENSG00000100401 | RANGAP1 |
| ENSG00000101115 | SALL4 | ENSG00000196230 | TUBB |
| ENSG00000100902 | PSMA6 | ENSG00000181555 | SETD2 |
| ENSG00000141141 | DDX52 | ENSG00000055950 | MRPL43 |
| ENSG00000254093 | PINX1 | ENSG00000188389 | PDCD1 |
| ENSG00000184445 | KNTC1 | ENSG00000165684 | SNAPC4 |
| ENSG00000089053 | ANAPC5 | ENSG00000147533 | GOLGA7 |
| ENSG00000111602 | TIMELESS | ENSG00000064313 | TAF2 |
| ENSG00000145592 | RPL37 | ENSG00000137154 | RPS6 |
| ENSG00000106615 | RHEB | ENSG00000104886 | PLEKHJ1 |
| ENSG00000180817 | PPA1 | ENSG00000122882 | ECD |
| ENSG00000110172 | CHORDC1 | ENSG00000184967 | NOC4L |
| ENSG00000137876 | RSL24D1 | ENSG00000088325 | TPX2 |
| ENSG00000104408 | EIF3E | ENSG00000183520 | UTP11L |
| ENSG00000143436 | MRPL9 | ENSG00000179051 | RCC2 |
| ENSG00000108883 | EFTUD2 | ENSG00000157510 | AFAP1L1 |
| ENSG00000140740 | UQCRC2 | ENSG00000066379 | ZNRD1 |
| ENSG00000211456 | SACM1L | ENSG00000172115 | CYCS |
| ENSG00000131051 | RBM39 | ENSG00000086827 | ZW10 |
| ENSG00000136758 | YME1L1 | ENSG00000109534 | GAR1 |
| ENSG00000112578 | BYSL | ENSG00000175387 | SMAD2 |
| ENSG00000163781 | TOPBP1 | ENSG00000115947 | ORC4 |
| ENSG00000106628 | POLD2 | ENSG00000010072 | SPRTN |
| ENSG00000132952 | USPL1 | ENSG00000185163 | DDX51 |
| ENSG00000168538 | TRAPPC11 | ENSG00000177370 | TIMM22 |
| ENSG00000168488 | ATXN2L | ENSG00000076924 | XAB2 |
| ENSG00000022277 | RTFDC1 | ENSG00000124562 | SNRPC |
| ENSG00000179988 | PSTK | ENSG00000127586 | CHTF18 |
| ENSG00000092199 | HNRNPC | ENSG00000066117 | SMARCD1 |
| ENSG00000156831 | NSMCE2 | ENSG00000177494 | ZBED2 |
| ENSG00000125691 | RPL23 | ENSG00000133401 | PDZD2 |
| ENSG00000083520 | DIS3 | ENSG00000127554 | GFER |
| ENSG00000115761 | NOL10 | ENSG00000117697 | NSL1 |
| ENSG00000173894 | CBX2 | ENSG00000184659 | FOXD4L4 |
| ENSG00000243147 | MRPL33 | ENSG00000204828 | FOXD4L2 |
| ENSG00000139618 | BRCA2 | ENSG00000110200 | ANAPC15 |
| ENSG00000109519 | GRPEL1 | ENSG00000169291 | SHE |
| ENSG00000203760 | CENPW | ENSG00000132313 | MRPL35 |
| ENSG00000166851 | PLK1 | ENSG00000115816 | CEBPZ |
| ENSG00000121579 | NAA50 | ENSG00000243667 | WDR92 |
| ENSG00000163608 | C3orf17 | ENSG00000107959 | PITRM1 |
| ENSG00000005075 | POLR2J | ENSG00000103035 | PSMD7 |
| ENSG00000148606 | POLR3A | ENSG00000163946 | FAM208A |
| ENSG00000160949 | TONSL | ENSG00000178057 | NDUFAF3 |
| ENSG00000128159 | TUBGCP6 | ENSG00000170540 | ARL6IP1 |
| ENSG00000125449 | ARMC7 | ENSG00000091009 | RBM27 |
| ENSG00000122406 | RPL5 | ENSG00000205609 | EIF3CL |
| ENSG00000126226 | PCID2 | ENSG00000165526 | RPUSD4 |
| ENSG00000159377 | PSMB4 | ENSG00000120314 | WDR55 |
| ENSG00000167967 | E4F1 | ENSG00000013275 | PSMC4 |
| ENSG00000141076 | CIRH1A | ENSG00000131931 | THAP1 |
| ENSG00000069248 | NUP133 | ENSG00000155660 | PDIA4 |
| ENSG00000242372 | EIF6 | ENSG00000162607 | USP1 |
| ENSG00000087269 | NOP14 | ENSG00000109606 | DHX15 |
| ENSG00000163468 | CCT3 | ENSG00000261949 | LOC100507003 |
| ENSG00000140326 | CDAN1 | ENSG00000130589 | HELZ2 |
| ENSG00000146834 | MEPCE | ENSG00000145734 | BDP1 |
| ENSG00000143222 | UFC1 | ENSG00000103194 | USP10 |
| ENSG00000110871 | COQ5 | ENSG00000076201 | PTPN23 |
| ENSG00000119285 | HEATR1 | ENSG00000140854 | KATNB1 |
| ENSG00000145386 | CCNA2 | ENSG00000164053 | ATRIP |
| ENSG00000164109 | MAD2L1 | ENSG00000167088 | SNRPD1 |
| ENSG00000185347 | C14orf80 | ENSG00000154781 | CCDC174 |
| ENSG00000134748 | PRPF38A | ENSG00000115446 | UNC50 |
| ENSG00000070061 | IKBKAP | ENSG00000177700 | POLR2L |
| ENSG00000099995 | SF3A1 | ENSG00000162063 | CCNF |
| ENSG00000100029 | PES1 | ENSG00000152904 | GGPS1 |
| ENSG00000130255 | RPL36 | ENSG00000151657 | KIN |
| ENSG00000085231 | AK6 | ENSG00000182810 | DDX28 |
| ENSG00000187145 | MRPS21 | ENSG00000006744 | ELAC2 |
| ENSG00000062650 | WAPAL | ENSG00000116898 | MRPS15 |
| ENSG00000122484 | RPAP2 | ENSG00000255072 | PIGY |
| ENSG00000090861 | AARS | ENSG00000130332 | LSM7 |
| ENSG00000161888 | SPC24 | ENSG00000051180 | RAD51 |
| ENSG00000087087 | SRRT | ENSG00000178171 | AMER3 |
| ENSG00000134910 | STT3A | ENSG00000254901 | MEF2BNB |
| ENSG00000161526 | SAP30BP | ENSG00000149925 | ALDOA |
| ENSG00000068654 | POLR1A | ENSG00000100604 | CHGA |
| ENSG00000140983 | RHOT2 | ENSG00000172602 | RND1 |
| ENSG00000184708 | EIF4ENIF1 | ENSG00000138592 | USP8 |
| ENSG00000100479 | POLE2 | ENSG00000172613 | RAD9A |
| ENSG00000134440 | NARS | ENSG00000132196 | HSD17B7 |
| ENSG00000014164 | ZC3H3 | ENSG00000151849 | CENPJ |
| ENSG00000113812 | ACTR8 | ENSG00000105221 | AKT2 |
| ENSG00000145331 | TRMT10A | ENSG00000185504 | C17orf70 |
| ENSG00000110104 | CCDC86 | ENSG00000025796 | SEC63 |
| ENSG00000164163 | ABCE1 | ENSG00000168438 | CDC40 |
| ENSG00000167863 | ATP5H | ENSG00000163918 | RFC4 |
| ENSG00000176946 | THAP4 | ENSG00000152147 | GEMIN6 |
| ENSG00000169251 | NMD3 | ENSG00000166887 | VPS39 |
| ENSG00000166226 | CCT2 | ENSG00000018625 | ATP1A2 |
| ENSG00000131747 | TOP2A | ENSG00000163346 | PBXIP1 |
| ENSG00000267673 | FDX1L | ENSG00000135966 | TGFBRAP1 |
| ENSG00000108559 | NUP88 | ENSG00000099901 | RANBP1 |
| ENSG00000104957 | CCDC130 | ENSG00000010327 | STAB1 |
| ENSG00000167522 | ANKRD11 | ENSG00000163344 | PMVK |
| ENSG00000130706 | ADRM1 | ENSG00000102921 | N4BP1 |
| ENSG00000048162 | NOP16 | ENSG00000177150 | FAM210A |
| ENSG00000159210 | SNF8 | ENSG00000158042 | MRPL17 |
| ENSG00000113360 | DROSHA | ENSG00000124659 | TBCC |
| ENSG00000108296 | CWC25 | ENSG00000113593 | PPWD1 |
| ENSG00000161395 | PGAP3 | ENSG00000188306 | LRRIQ4 |
| ENSG00000089195 | TRMT6 | ENSG00000074966 | TXK |
| ENSG00000185838 | GNB1L | ENSG00000228049 | POLR2J2 |
| ENSG00000101146 | RAE1 | ENSG00000133226 | SRRM1 |
| ENSG00000092853 | CLSPN | ENSG00000121577 | POPDC2 |
| ENSG00000107949 | BCCIP | ENSG00000130876 | SLC7A10 |
| ENSG00000159079 | C21orf59 | ENSG00000130810 | PPAN |
| ENSG00000137947 | GTF2B | ENSG00000243207 | PPAN-P2RY11 |
| ENSG00000160948 | VPS28 | ENSG00000081248 | CACNA1S |
| ENSG00000065427 | KARS | ENSG00000153201 | RANBP2 |
| ENSG00000102978 | POLR2C | ENSG00000126698 | DNAJC8 |
| ENSG00000182154 | MRPL41 | ENSG00000103018 | CYB5B |
| ENSG00000139168 | ZCRB1 | ENSG00000130816 | DNMT1 |
| ENSG00000175110 | MRPS22 | ENSG00000102103 | PQBP1 |
| ENSG00000177084 | POLE | ENSG00000120253 | NUP43 |
| ENSG00000197681 | TBC1D3 | ENSG00000164327 | RICTOR |
| ENSG00000053501 | USE1 | ENSG00000139719 | VPS33A |
| ENSG00000121879 | PIK3CA | ENSG00000168566 | SNRNP48 |
| ENSG00000108278 | ZNHIT3 | ENSG00000063244 | U2AF2 |
| ENSG00000161547 | SRSF2 | ENSG00000108423 | TUBD1 |
| ENSG00000129083 | COPB1 | ENSG00000164880 | INTS1 |
| ENSG00000012048 | BRCA1 | ENSG00000148297 | MED22 |
| ENSG00000171314 | PGAM1 | ENSG00000185825 | BCAP31 |
| ENSG00000112159 | MDN1 | ENSG00000084623 | EIF3I |
| ENSG00000174243 | DDX23 | ENSG00000066422 | ZBTB11 |
| ENSG00000096401 | CDC5L | ENSG00000119041 | GTF3C3 |
| ENSG00000128513 | POT1 | ENSG00000083093 | PALB2 |
| ENSG00000071859 | FAM50A | ENSG00000120699 | EXOSC8 |
| ENSG00000100084 | HIRA | ENSG00000166135 | HIF1AN |
| ENSG00000100813 | ACIN1 | ENSG00000188976 | NOC2L |
| ENSG00000005100 | DHX33 | ENSG00000102974 | CTCF |
| ENSG00000101158 | NELFCD | ENSG00000148229 | POLE3 |
| ENSG00000115946 | PNO1 | ENSG00000167118 | URM1 |
| ENSG00000188647 | PTAR1 | ENSG00000176386 | CDC26 |
| ENSG00000146007 | ZMAT2 | ENSG00000110063 | DCPS |
| ENSG00000241837 | ATP5O | ENSG00000089737 | DDX24 |
| ENSG00000113643 | RARS | ENSG00000119383 | PPP2R4 |
| ENSG00000162521 | RBBP4 | ENSG00000143319 | ISG20L2 |
| ENSG00000116830 | TTF2 | ENSG00000141552 | ANAPC11 |
| ENSG00000187555 | USP7 | ENSG00000155506 | LARP1 |
| ENSG00000137216 | TMEM63B | ENSG00000144867 | SRPRB |
| ENSG00000161904 | LEMD2 | ENSG00000093000 | NUP50 |
| ENSG00000241945 | PWP2 | ENSG00000107937 | GTPBP4 |
| ENSG00000134982 | APC | ENSG00000083635 | NUFIP1 |
| ENSG00000156983 | BRPF1 | ENSG00000174527 | MYO1H |
| ENSG00000164346 | NSA2 | ENSG00000124641 | MED20 |
| ENSG00000223496 | EXOSC6 | ENSG00000240694 | PNMA2 |
| ENSG00000113569 | NUP155 | ENSG00000122012 | SV2C |
| ENSG00000080986 | NDC80 | ENSG00000017260 | ATP2C1 |
| ENSG00000143374 | TARS2 | ENSG00000179965 | ZNF771 |
| ENSG00000104835 | SARS2 | ENSG00000126216 | TUBGCP3 |
| ENSG00000152253 | SPC25 | ENSG00000126814 | TRMT5 |
| ENSG00000088356 | PDRG1 | ENSG00000101945 | SUV39H1 |
| ENSG00000044574 | HSPA5 | ENSG00000182185 | RAD51B |
| ENSG00000116874 | WARS2 | ENSG00000163681 | SLMAP |
| ENSG00000204531 | POU5F1 | ENSG00000179295 | PTPN11 |
| ENSG00000004779 | NDUFAB1 | ENSG00000004487 | KDM1A |
| ENSG00000161981 | SNRNP25 | ENSG00000136100 | VPS36 |
| ENSG00000126457 | PRMT1 | ENSG00000168066 | SF1 |
| ENSG00000142507 | PSMB6 | ENSG00000197181 | PIWIL2 |
| ENSG00000164808 | SPIDR | ENSG00000128908 | INO80 |
| ENSG00000234972 | TBC1D3C | ENSG00000102144 | PGK1 |
| ENSG00000144554 | FANCD2 | ENSG00000007923 | DNAJC11 |
| ENSG00000147383 | NSDHL | ENSG00000143514 | TP53BP2 |
| ENSG00000165732 | DDX21 | ENSG00000076650 | GPATCH1 |
| ENSG00000155975 | VPS37A | ENSG00000130749 | ZC3H4 |
| ENSG00000002822 | MADIL1 | ENSG00000062582 | MRPS24 |
| ENSG00000179271 | GADD45GIP1 | ENSG00000087085 | ACHE |
| ENSG00000101452 | DHX35 | ENSG00000197976 | AKAP17A |
| ENSG00000074071 | MRPS34 | ENSG00000100028 | SNRPD3 |
| ENSG00000169045 | HNRNPH1 | ENSG00000128731 | HERC2 |
| ENSG00000087510 | TFAP2C | ENSG00000134014 | ELP3 |
| ENSG00000105819 | PMPCB | ENSG00000181163 | NPM1 |
| ENSG00000204351 | SKIV2L | ENSG00000148444 | COMMD3 |
| ENSG00000160783 | PMF1 | ENSG00000095319 | NUP188 |
| ENSG00000152234 | ATP5A1 | ENSG00000169564 | PCBP1 |
| ENSG00000127463 | EMC1 | ENSG00000182208 | MOB2 |
| ENSG00000124228 | DDX27 | ENSG00000055070 | SZRD1 |
| ENSG00000100319 | ZMAT5 | ENSG00000182473 | EXOC7 |
| ENSG00000065183 | WDR3 | ENSG00000136930 | PSMB7 |
| ENSG00000058272 | PPP1R12A | ENSG00000107863 | ARHGAP21 |
| ENSG00000136628 | EPRS | ENSG00000197223 | C1D |
| ENSG00000163017 | ACTG2 | ENSG00000184270 | HIST2H2AB |
| ENSG00000104884 | ERCC2 | ENSG00000161036 | LRWD1 |
| ENSG00000166483 | WEE1 | ENSG00000144736 | SHQ1 |
| ENSG00000135837 | CEP350 | ENSG00000137100 | DCTN3 |
| ENSG00000104897 | SF3A2 | ENSG00000131149 | GSE1 |
| ENSG00000140598 | EFTUD1 | ENSG00000214753 | HNRNPUL2 |
| ENSG00000143774 | GUK1 | ENSG00000111358 | GTF2H3 |
| ENSG00000085721 | RRN3 | ENSG00000147677 | EIF3H |
| ENSG00000172053 | QARS | ENSG00000125676 | THOC2 |
| ENSG00000165934 | CPSF2 | ENSG00000149554 | CHEK1 |
| ENSG00000052802 | MSMO1 | ENSG00000176476 | CCDC101 |
| ENSG00000135476 | ESPL1 | ENSG00000147596 | PRDM14 |
| ENSG00000174177 | CTU2 | ENSG00000092094 | OSGEP |
| ENSG00000120438 | TCP1 | ENSG00000155393 | HEATR3 |
| ENSG00000170892 | TSEN34 | ENSG00000083845 | RPS5 |
| ENSG00000204574 | ABCF1 | ENSG00000148296 | SURF6 |
| ENSG00000175376 | EIF1AD | ENSG00000162613 | FUBP1 |
| ENSG00000146263 | MMS22L | ENSG00000182220 | ATP6AP2 |
| ENSG00000121022 | COPS5 | ENSG00000115163 | CENPA |
| ENSG00000168090 | COPS6 | ENSG00000176225 | RTTN |
| ENSG00000167491 | GATAD2A | ENSG00000176208 | ATAD5 |
| ENSG00000084072 | PPIE | ENSG00000254827 | SLC22A18AS |
| ENSG00000115268 | RPS15 | ENSG00000128708 | HAT1 |
| ENSG00000163938 | GNL3 | ENSG00000106400 | ZNHIT1 |
| ENSG00000151665 | PIGF | ENSG00000123219 | CENPK |
| ENSG00000148843 | PDCD11 | ENSG00000264424 | MYH4 |
| ENSG00000141736 | ERBB2 | ENSG00000066468 | FGFR2 |
| ENSG00000103168 | TAF1C | ENSG00000095059 | DHPS |
| ENSG00000105401 | CDC37 | ENSG00000110921 | MVK |
| ENSG00000163933 | RFT1 | ENSG00000141556 | TBCD |
| ENSG00000122085 | MTERFD2 | ENSG00000196305 | IARS |
| ENSG00000164032 | H2AFZ | ENSG00000131055 | COX4I2 |
| ENSG00000140943 | MBTPS1 | ENSG00000153789 | FAM92B |
| ENSG00000198952 | SMG5 | ENSG00000088930 | XRN2 |
| ENSG00000169021 | UQCRFS1 | ENSG00000145220 | LYAR |
| ENSG00000013810 | TACC3 | ENSG00000172809 | RPL38 |
| ENSG00000105258 | POLR2I | ENSG00000108788 | MLX |
| ENSG00000167978 | SRRM2 | ENSG00000197170 | PSMD12 |
| ENSG00000095564 | BTAF1 | ENSG00000225899 | FRG2B |
| ENSG00000138095 | LRPPRC | ENSG00000174886 | NDUFA11 |
| ENSG00000063978 | RNF4 | ENSG00000172058 | SERF1A |
| ENSG00000162368 | CMPK1 | ENSG00000205572 | SERF1B |
| ENSG00000140829 | DHX38 | ENSG00000242485 | MRPL20 |
| ENSG00000158169 | FANCC | ENSG00000089225 | TBX5 |
| ENSG00000161960 | EIF4A1 | ENSG00000149428 | HYOU1 |
| ENSG00000181222 | POLR2A | ENSG00000166595 | FAM96B |
| ENSG00000165916 | PSMC3 | ENSG00000131462 | TUBG1 |
| ENSG00000198060 | MARCH5 | ENSG00000185990 | F8A3 |
| ENSG00000149923 | PPP4C | ENSG00000197932 | F8A1 |
| ENSG00000111667 | USP5 | ENSG00000198444 | F8A2 |
| ENSG00000198755 | RPL10A | ENSG00000031823 | RANBP3 |
| ENSG00000141499 | WRAP53 | ENSG00000100353 | EIF3D |
| ENSG00000093009 | CDC45 | ENSG00000163605 | PPP4R2 |
| ENSG00000105732 | ZNF574 | ENSG00000164162 | ANAPC10 |
| ENSG00000104064 | GABPB1 | ENSG00000132153 | DHX30 |
| ENSG00000108294 | PSMB3 | ENSG00000154723 | ATP5J |
| ENSG00000130856 | ZNF236 | ENSG00000182256 | GABRG3 |
| ENSG00000133980 | VRTN | ENSG00000119487 | MAPKAP1 |
| ENSG00000149308 | NPAT | ENSG00000132394 | EEFSEC |
| ENSG00000120071 | KANSL1 | ENSG00000122952 | ZWINT |
| ENSG00000129084 | PSMA1 | ENSG00000131042 | LILRB2 |
| ENSG00000117877 | CD3EAP | ENSG00000222004 | C7orf71 |
| ENSG00000127616 | SMARCA4 | ENSG00000168802 | CHTF8 |
| ENSG00000163882 | POLR2H | ENSG00000069849 | ATP1B3 |
| ENSG00000183718 | TRIM52 | ENSG00000074582 | BCS1L |
| ENSG00000106803 | SEC61B | ENSG00000103126 | AXIN1 |
| ENSG00000114942 | EEF1B2 | ENSG00000187144 | SPATA21 |
| ENSG00000067704 | IARS2 | ENSG00000221914 | PPP2R2A |
| ENSG00000114686 | MRPL3 | ENSG00000163386 | NBPF10 |
| ENSG00000172315 | TP53RK | ENSG00000134987 | WDR36 |
| ENSG00000173120 | KDM2A | ENSG00000132300 | PTCD3 |
| ENSG00000138442 | WDR12 | ENSG00000156931 | VPS8 |
| ENSG00000145982 | FARS2 | ENSG00000165632 | TAF3 |
| ENSG00000117481 | NSUN4 | ENSG00000044115 | CTNNA1 |
| ENSG00000142676 | RPL11 | ENSG00000035403 | VCL |
| ENSG00000164615 | CAMLG | ENSG00000088256 | GNA11 |
| ENSG00000138073 | PREB | ENSG00000164334 | FAM170A |
| ENSG00000136888 | ATP6V1G1 | ENSG00000166225 | FRS2 |
| ENSG00000221829 | FANCG | ENSG00000241186 | TDGF1 |
| ENSG00000198887 | SMC5 | ENSG00000196374 | HIST1H2BM |
| ENSG00000102900 | NUP93 | ENSG00000117614 | SYF2 |
| ENSG00000108344 | PSMD3 | ENSG00000154222 | CC2D1B |
| ENSG00000023191 | RNH1 | ENSG00000101367 | MAPRE1 |
| ENSG00000143621 | ILF2 | ENSG00000188186 | LAMTOR4 |
| ENSG00000112855 | HARS2 | ENSG00000166924 | NYAP1 |
| ENSG00000110536 | PTPMT1 | ENSG00000079805 | DNM2 |
| ENSG00000165629 | ATP5C1 | ENSG00000011260 | UTP18 |
| ENSG00000166847 | DCTN5 | ENSG00000089685 | BIRC5 |
| ENSG00000104852 | SNRNP70 | ENSG00000123908 | AGO2 |
| ENSG00000203814 | HIST2H2BF | ENSG00000057935 | MTA3 |
| ENSG00000009413 | REV3L | ENSG00000100811 | YY1 |
| ENSG00000130772 | MED18 | ENSG00000064102 | ASUN |
| ENSG00000079313 | REXO1 | ENSG00000006025 | OSBPL7 |
| ENSG00000012061 | ERCC1 | ENSG00000107372 | ZFAND5 |
| ENSG00000111642 | CHD4 | ENSG00000172922 | RNASEH2C |
| ENSG00000100462 | PRMT5 | ENSG00000075089 | ACTR6 |
| ENSG00000174100 | MRPL45 | ENSG00000165119 | HNRNPK |
| ENSG00000101421 | CHMP4B | ENSG00000182518 | FAM104B |
| ENSG00000144028 | SNRNP200 | ENSG00000041802 | LSG1 |
| ENSG00000108592 | FTSJ3 | ENSG00000206557 | TRIM71 |
| ENSG00000110048 | OSBP | ENSG00000124140 | SLC12A5 |
| ENSG00000147403 | RPL10 | ENSG00000063046 | EIF4B |
| ENSG00000198783 | ZNF830 | ENSG00000126581 | BECN1 |
| ENSG00000179409 | GEMIN4 | ENSG00000171530 | TBCA |
| ENSG00000147604 | RPL7 | ENSG00000206127 | GOLGA8O |
| ENSG00000136824 | SMC2 | ENSG00000167842 | MIS12 |
| ENSG00000104889 | RNASEH2A | ENSG00000033011 | ALG1 |
| ENSG00000146282 | RARS2 | ENSG00000146670 | CDCA5 |
| ENSG00000068784 | SRBD1 | ENSG00000198856 | OSTC |
| ENSG00000137822 | TUBGCP4 | ENSG00000111605 | CPSF6 |
| ENSG00000059691 | PET112 | ENSG00000087365 | SF3B2 |
| ENSG00000066827 | ZFAT | ENSG00000135845 | PIGC |
| ENSG00000148308 | GTF3C5 | ENSG00000100220 | RTCB |
| ENSG00000170185 | USP38 | ENSG00000131876 | SNRPA1 |
| ENSG00000160201 | U2AF1 | ENSG00000115392 | FANCL |
| ENSG00000141258 | SGSM2 | ENSG00000078618 | NRD1 |
| ENSG00000172660 | TAF15 | ENSG00000025770 | NCAPH2 |
| ENSG00000145833 | DDX46 | ENSG00000117682 | DHDDS |
| ENSG00000104980 | TIMM44 | ENSG00000198844 | ARHGEF15 |
| ENSG00000097046 | CDC7 | ENSG00000132603 | NIP7 |
| ENSG00000131368 | MRPS25 | ENSG00000162377 | SELRC1 |
| ENSG00000204209 | DAXX | ENSG00000137411 | VARS2 |
| ENSG00000129696 | TTI2 | ENSG00000064886 | CHI3L2 |
| ENSG00000108848 | LUC7L3 | ENSG00000137806 | NDUFAF1 |
| ENSG00000013573 | DDX11 | ENSG00000133030 | MPRIP |
| ENSG00000105248 | CCDC94 | ENSG00000136935 | GOLGA1 |
| ENSG00000183598 | HIST2H3D | ENSG00000243927 | MRPS6 |
| ENSG00000224226 | TBC1D3B | ENSG00000046647 | GEMIN8 |
| ENSG00000090470 | PDCD7 | ENSG00000133124 | IRS4 |
| ENSG00000031698 | SARS | ENSG00000255346 | NOX5 |
| ENSG00000108270 | AATF | ENSG00000103275 | UBE2I |
| ENSG00000159111 | MRPL10 | ENSG00000165502 | RPL36AL |
| ENSG00000149806 | FAU | ENSG00000100056 | DGCR14 |
| ENSG00000188739 | RBM34 | ENSG00000167972 | ABCA3 |
| ENSG00000152684 | PELO | ENSG00000053372 | MRTO4 |
| ENSG00000174374 | WBSCR16 | ENSG00000169813 | HNRNPF |
| ENSG00000107036 | KIAA1432 | ENSG00000198258 | UBL5 |
| ENSG00000204619 | PPP1R11 | ENSG00000103245 | NARFL |
| ENSG00000091651 | ORC6 | ENSG00000183513 | COA5 |
| ENSG00000134480 | CCNH | ENSG00000174547 | MRPL11 |
| ENSG00000164151 | KIAA0947 | ENSG00000173457 | PPP1R14B |
| ENSG00000164611 | PTTG1 | ENSG00000088038 | CNOT3 |
| ENSG00000111445 | RFC5 | ENSG00000115539 | PDCL3 |
| ENSG00000127481 | UBR4 | ENSG00000118181 | RPS25 |
| ENSG00000159352 | PSMD4 | ENSG00000160075 | SSU72 |
| ENSG00000137814 | HAUS2 | ENSG00000257949 | TEN1 |
| ENSG00000105220 | GPI | ENSG00000168028 | RPSA |
| ENSG00000140521 | POLG | ENSG00000213066 | FGFR1OP |
| ENSG00000075856 | SART3 | ENSG00000143228 | NUF2 |
| ENSG00000143742 | SRP9 | ENSG00000137413 | TAF8 |
| ENSG00000163029 | SMC6 | ENSG00000124207 | CSE1L |
| ENSG00000162227 | TAF6L | ENSG00000080815 | PSEN1 |
| ENSG00000100129 | EIF3L | ENSG00000132773 | TOE1 |
| ENSG00000170348 | TMED10 | ENSG00000129460 | NGDN |
| ENSG00000182217 | HIST2H4B | ENSG00000188613 | NANOS1 |
| ENSG00000183941 | HIST2H4A | ENSG00000163636 | PSMD6 |
| ENSG00000116221 | MRPL37 | ENSG00000146232 | NFKBIE |
| ENSG00000196235 | SUPT5H | ENSG00000135902 | CHRND |
| ENSG00000161920 | MED11 | ENSG00000143641 | GALNT2 |
| ENSG00000134690 | CDCA8 | ENSG00000073969 | NSF |
| ENSG00000131153 | GINS2 | ENSG00000041982 | TNC |
| ENSG00000138018 | EPT1 | ENSG00000108256 | NUFIP2 |
| ENSG00000173141 | MRP63 | ENSG00000198911 | SREBF2 |
| ENSG00000154727 | GABPA | ENSG00000141385 | AFG3L2 |
| ENSG00000120800 | UTP20 | ENSG00000176108 | CHMP6 |
| ENSG00000114767 | RRP9 | ENSG00000257365 | FNTB |
| ENSG00000174231 | PRPF8 | ENSG00000186487 | MYT1L |
| ENSG00000137547 | MRPL15 | ENSG00000127423 | AUNIP |
| ENSG00000146576 | C7orf26 | ENSG00000112110 | MRPL18 |
| ENSG00000065268 | WDR18 | ENSG00000114650 | SCAP |
| ENSG00000147162 | OGT | ENSG00000178104 | PDE4DIP |
| ENSG00000198917 | C9orf114 | ENSG00000105656 | ELL |
| ENSG00000180822 | PSMG4 | ENSG00000186393 | KRT26 |
| ENSG00000125977 | EIF2S2 | ENSG00000124541 | RRP36 |
| ENSG00000173418 | NAA20 | ENSG00000182108 | DEXI |
| ENSG00000155561 | NUP205 | ENSG00000139133 | ALG10 |
| ENSG00000173545 | ZNF622 | ENSG00000082068 | WDR70 |
| ENSG00000127993 | RBM48 | ENSG00000151388 | ADAMTS12 |
| ENSG00000197102 | DYNC1H1 | ENSG00000172172 | MRPL13 |
| ENSG00000119392 | GLE1 | ENSG00000184979 | USP18 |
| ENSG00000174444 | RPL4 | ENSG00000239857 | GET4 |
| ENSG00000149716 | ORAOV1 | ENSG00000069345 | DNAJA2 |
| ENSG00000155876 | RRAGA | ENSG00000073050 | XRCC1 |
| ENSG00000198841 | KTI12 | ENSG00000070985 | TRPM5 |
| ENSG00000056097 | ZFR | ENSG00000158715 | SLC45A3 |
| ENSG00000227057 | WDR46 | ENSG00000172062 | SMN1 |
| ENSG00000167670 | CHAF1A | ENSG00000205571 | SMN2 |
| ENSG00000127191 | TRAF2 | ENSG00000113141 | IK |
| ENSG00000072506 | HSD17B10 | ENSG00000186105 | LRRC70 |
| ENSG00000215021 | PHB2 | ENSG00000157895 | C12orf43 |
| ENSG00000175467 | SART1 | ENSG00000166441 | RPL27A |
| ENSG00000121073 | SLC35B1 | ENSG00000106346 | USP42 |
| ENSG00000079459 | FDFT1 | ENSG00000185379 | RAD51D |
| ENSG00000143493 | INTS7 | ENSG00000116667 | C1orf21 |
| ENSG00000141543 | EIF4A3 | ENSG00000176444 | CLK2 |
| ENSG00000174197 | MGA | ENSG00000105472 | CLEC11A |
| ENSG00000131269 | ABCB7 | ENSG00000065613 | SLK |
| ENSG00000089009 | RPL6 | ENSG00000005156 | LIG3 |
| ENSG00000197780 | TAF13 | ENSG00000125459 | MSTO1 |
| ENSG00000036549 | ZZZ3 | ENSG00000139146 | FAM60A |
| ENSG00000066135 | KDM4A | ENSG00000060069 | CTDP1 |
| ENSG00000176473 | WDR25 | ENSG00000130935 | NOL11 |
| ENSG00000124614 | RPS10 | ENSG00000115677 | HDLBP |
| ENSG00000107581 | EIF3A | ENSG00000105254 | TBCB |
| ENSG00000084463 | WBP11 | ENSG00000075539 | FRYL |
| ENSG00000137656 | BUD13 | ENSG00000196747 | HIST1H2AI |
| ENSG00000183751 | TBL3 | ENSG00000181513 | ACBD4 |
| ENSG00000119537 | KDSR | ENSG00000153107 | ANAPC1 |
| ENSG00000204220 | PFDN6 | ENSG00000160211 | G6PD |
| ENSG00000170291 | ELP5 | ENSG00000111481 | COPZ1 |
| ENSG00000198563 | DDX39B | ENSG00000070761 | C16orf80 |
| ENSG00000077549 | CAPZB | ENSG00000168924 | LETM1 |
| ENSG00000255529 | POLR2M | ENSG00000105058 | FAM32A |
| ENSG00000100034 | PPM1F | ENSG00000204569 | PPP1R10 |
| ENSG00000196367 | TRRAP | ENSG00000153914 | SREK1 |
| ENSG00000167258 | CDK12 | ENSG00000161509 | GRIN2C |
| ENSG00000039123 | SKIV2L2 | ENSG00000162702 | ZNF281 |
| ENSG00000076043 | REXO2 | ENSG00000004939 | SLC4A1 |
| ENSG00000213676 | ATF6B | ENSG00000139620 | KANSL2 |
| ENSG00000058453 | CROCC | ENSG00000025293 | PHF20 |
| ENSG00000153575 | TUBGCP5 | ENSG00000158545 | ZC3H18 |
| ENSG00000110700 | RPS13 | ENSG00000142546 | NOSIP |
| ENSG00000101181 | MTG2 | ENSG00000143398 | PIP5K1A |
| ENSG00000071539 | TRIP13 | ENSG00000197958 | RPL12 |
| ENSG00000075702 | WDR62 | ENSG00000067225 | PKM |
| ENSG00000171453 | POLR1C | ENSG00000172534 | HCFC1 |
| ENSG00000090989 | EXOC1 | ENSG00000155438 | MKI67IP |
| ENSG00000037897 | METTL1 | ENSG00000166582 | CENPV |
| ENSG00000095139 | ARCN1 | ENSG00000145912 | NHP2 |
| ENSG00000078142 | PIK3C3 | ENSG00000180992 | MRPL14 |
| ENSG00000141030 | COPS3 | ENSG00000118705 | RPN2 |
| ENSG00000126249 | PDCD2L | ENSG00000163161 | ERCC3 |
| ENSG00000117408 | IPO13 | ENSG00000136819 | C9orf78 |
| ENSG00000130725 | UBE2M | ENSG00000124787 | RPP40 |
| ENSG00000175054 | ATR | ENSG00000179104 | TMTC2 |
| ENSG00000149016 | TUT1 | ENSG00000140694 | PARN |
| ENSG00000165060 | FXN | ENSG00000143751 | SDE2 |
| ENSG00000117597 | DIEXF | ENSG00000136997 | MYC |
| ENSG00000185085 | INTS5 | ENSG00000147274 | RBMX |
| ENSG00000113595 | TRIM23 | ENSG00000084693 | AGBL5 |
| ENSG00000040633 | PHF23 | ENSG00000165271 | NOL6 |
| ENSG00000178952 | TUFM | ENSG00000221838 | AP4M1 |
| ENSG00000120539 | MASTL | ENSG00000171444 | MCC |
| ENSG00000103549 | RNF40 | ENSG00000101882 | NKAP |
| ENSG00000119723 | COQ6 | ENSG00000186847 | KRT14 |
| ENSG00000171311 | EXOSC1 | ENSG00000014824 | SLC30A9 |
| ENSG00000106245 | BUD31 | ENSG00000166685 | COG1 |
| ENSG00000118046 | STK11 | ENSG00000108349 | CASC3 |
| ENSG00000125484 | GTF3C4 | ENSG00000175216 | CKAP5 |
| ENSG00000089094 | KDM2B | ENSG00000259494 | MRPL46 |
| ENSG00000121621 | KIF18A | ENSG00000028310 | BRD9 |
| ENSG00000129911 | KLF16 | ENSG00000136450 | SRSF1 |
| ENSG00000102302 | FGD1 | ENSG00000204859 | ZBTB48 |
| ENSG00000135679 | MDM2 | ENSG00000165209 | STRBP |
| ENSG00000185115 | NDNL2 | ENSG00000163466 | ARPC2 |
| ENSG00000140553 | UNC45A | ENSG00000125485 | DDX31 |
| ENSG00000129562 | DAD1 | ENSG00000070778 | PTPN21 |
| ENSG00000100138 | NHP2L1 | ENSG00000126001 | CEP250 |
| ENSG00000111641 | NOP2 | ENSG00000169249 | ZRSR2 |
| ENSG00000173660 | UQCRH | ENSG00000111011 | RSRC2 |
| ENSG00000198677 | TTC37 | ENSG00000139496 | NUPL1 |
| ENSG00000135503 | ACVR1B | ENSG00000131746 | TNS4 |
| ENSG00000180998 | GPR137C | ENSG00000061936 | SFSWAP |
| ENSG00000153187 | HNRNPU | ENSG00000196584 | XRCC2 |
| ENSG00000106459 | NRF1 | ENSG00000168286 | THAP11 |
| ENSG00000156261 | CCT8 | ENSG00000119787 | ATL2 |
| ENSG00000118363 | SPCS2 | ENSG00000182446 | NPLOC4 |
| ENSG00000164134 | NAA15 | ENSG00000071462 | WBSCR22 |
| ENSG00000060642 | PIGV | ENSG00000213397 | HAUS7 |
| ENSG00000090889 | KIF4A | ENSG00000178028 | DMAP1 |
| ENSG00000101361 | NOP56 | ENSG00000067596 | DHX8 |
| ENSG00000167792 | NDUFV1 | ENSG00000198015 | MRPL42 |
| ENSG00000184162 | NR2C2AP | ENSG00000133706 | LARS |
| ENSG00000128524 | ATP6V1F | ENSG00000149635 | OCSTAMP |
| ENSG00000100387 | RBX1 | ENSG00000117505 | DR1 |
| ENSG00000110906 | KCTD10 | ENSG00000155868 | MED7 |
| ENSG00000147457 | CHMP7 | ENSG00000129197 | RPAIN |
| ENSG00000124570 | SERPINB6 | ENSG00000065978 | YBX1 |
| ENSG00000186468 | RPS23 | ENSG00000260238 | PMF1-BGLAP |
| ENSG00000136122 | BORA | ENSG00000178988 | MRFAP1L1 |
| ENSG00000047249 | ATP6V1H | ENSG00000168005 | C11orf84 |
| ENSG00000127804 | METTL16 | ENSG00000162408 | NOL9 |
| ENSG00000104412 | EMC2 | ENSG00000140350 | ANP32A |
| ENSG00000173726 | TOMM20 | ENSG00000261796 | ISY1-RAB43 |
| ENSG00000138777 | PPA2 | ENSG00000174405 | LIG4 |
| ENSG00000170043 | TRAPPC1 | ENSG00000197414 | GOLGA6L1 |
| ENSG00000124486 | USP9X | ENSG00000116062 | MSH6 |
| ENSG00000105705 | SUGP1 | ENSG00000116906 | GNPAT |
| ENSG00000223501 | VPS52 | ENSG00000134597 | RBMX2 |
| ENSG00000107815 | C10orf2 | ENSG00000071994 | PDCD2 |
| ENSG00000100109 | TFIP11 | ENSG00000112742 | TTK |
| ENSG00000136271 | DDX56 | ENSG00000106636 | YKT6 |
| ENSG00000146830 | GIGYF1 | ENSG00000101773 | RBBP8 |
| ENSG00000198382 | UVRAG | ENSG00000103061 | SLC7A6OS |
| ENSG00000160285 | LSS | ENSG00000140259 | MFAP1 |
| ENSG00000137770 | CTDSPL2 | ENSG00000197077 | KIAA1671 |
| ENSG00000116670 | MAD2L2 | ENSG00000204435 | CSNK2B |
| ENSG00000165280 | VCP | ENSG00000055130 | CUL1 |
| ENSG00000183963 | SMTN | ENSG00000100209 | HSCB |
| ENSG00000164961 | KIAA0196 | ENSG00000113048 | MRPS27 |
| ENSG00000157216 | SSBP3 | ENSG00000189403 | HMGB1 |
| ENSG00000129932 | DOHH | ENSG00000173011 | TADA2B |
| ENSG00000167721 | TSR1 | ENSG00000169836 | TACR3 |
| ENSG00000188352 | FOCAD | ENSG00000133816 | MICAL2 |
| ENSG00000104853 | CLPTM1 | ENSG00000141452 | C18orf8 |
| ENSG00000185883 | ATP6V0C | ENSG00000006715 | VPS41 |
| ENSG00000100519 | PSMC6 | ENSG00000136518 | ACTL6A |
| ENSG00000110107 | PRPF19 | ENSG00000100297 | MCM5 |
| ENSG00000184203 | PPP1R2 | ENSG00000165898 | ISCA2 |
| ENSG00000148824 | MTG1 | ENSG00000156384 | SFR1 |
| ENSG00000113810 | SMC4 | ENSG00000145414 | NAF1 |
| ENSG00000121152 | NCAPH | ENSG00000101972 | STAG2 |
| ENSG00000241127 | YAE1D1 | ENSG00000112658 | SRF |
| ENSG00000139197 | PEX5 | ENSG00000162736 | NCSTN |
| ENSG00000101464 | PIGU | ENSG00000103266 | STUB1 |
| ENSG00000132676 | DAP3 | ENSG00000008018 | PSMB1 |
| ENSG00000135972 | MRPS9 | ENSG00000149506 | ZP1 |
| ENSG00000089157 | RPLP0 | ENSG00000111530 | CAND1 |
| ENSG00000138035 | PNPT1 | ENSG00000027001 | MIPEP |
| ENSG00000171824 | EXOSC10 | ENSG00000152266 | PTH |
| ENSG00000153179 | RASSF3 | ENSG00000154174 | TOMM70A |
| ENSG00000110713 | NUP98 | ENSG00000164045 | CDC25A |
| ENSG00000100865 | CINP | ENSG00000164758 | MED30 |
| ENSG00000136045 | PWP1 | ENSG00000160401 | C9orf117 |
| ENSG00000167526 | RPL13 | ENSG00000155959 | VBP1 |
| ENSG00000088766 | CRLS1 | ENSG00000105409 | ATP1A3 |
| ENSG00000103510 | KAT8 | ENSG00000175106 | TVP23C |
| ENSG00000143368 | SF3B4 | ENSG00000185950 | IRS2 |
| ENSG00000156697 | UTP14A | ENSG00000149256 | TENM4 |
| ENSG00000176248 | ANAPC2 | ENSG00000116957 | TBCE |
| ENSG00000188786 | MTF1 | ENSG00000154719 | MRPL39 |
| ENSG00000175756 | AURKAIP1 | ENSG00000105364 | MRPL4 |
| ENSG00000140395 | WDR61 | ENSG00000198218 | QRICH1 |
| ENSG00000113368 | LMNB1 | ENSG00000013503 | POLR3B |
| ENSG00000060339 | CCAR1 | ENSG00000126756 | UXT |
| ENSG00000162385 | MAGOH | ENSG00000184988 | TMEM106A |
| ENSG00000105372 | RPS19 | ENSG00000186432 | KPNA4 |
| ENSG00000083312 | TNPO1 | ENSG00000156304 | SCAF4 |
| ENSG00000100142 | POLR2F | ENSG00000090565 | RAB11FIP3 |
| ENSG00000204560 | DHX16 | ENSG00000163508 | EOMES |
| ENSG00000197771 | MCMBP | ENSG00000147003 | TMEM27 |
| ENSG00000099817 | POLR2E | ENSG00000198730 | CTR9 |
| ENSG00000161980 | POLR3K | ENSG00000105321 | CCDC9 |
| ENSG00000117133 | RPF1 | ENSG00000120333 | MRPS14 |
| ENSG00000125901 | MRPS26 | ENSG00000121680 | PEX16 |
| ENSG00000168827 | GFM1 | ENSG00000088205 | DDX18 |
| ENSG00000161513 | FDXR | ENSG00000132432 | SEC61G |
| ENSG00000137818 | RPLP1 | ENSG00000186329 | TMEM212 |
| ENSG00000150990 | DHX37 | ENSG00000094804 | CDC6 |
| ENSG00000061794 | MRPS35 | ENSG00000169084 | DHRSX |
| ENSG00000143155 | TIPRL | ENSG00000107618 | RBP3 |
| ENSG00000253626 | EIF5AL1 | ENSG00000146426 | TIAM2 |
| ENSG00000231500 | RPS18 | ENSG00000198925 | ATG9A |
| ENSG00000188076 | SCGB1C1 | ENSG00000168242 | HIST1H2BI |
| ENSG00000174442 | ZWILCH | ENSG00000254772 | EEF1G |
| ENSG00000242028 | HYPK | ENSG00000090971 | NAT14 |
| ENSG00000124217 | MOCS3 | ENSG00000144381 | HSPD1 |
| ENSG00000134186 | PRPF38B | ENSG00000127774 | EMC6 |
| ENSG00000105849 | TWISTNB | ENSG00000126259 | KIRREL2 |
| ENSG00000137337 | MDC1 | ENSG00000111364 | DDX55 |
| ENSG00000132207 | SLX1A | ENSG00000100749 | VRK1 |
| ENSG00000181625 | SLX1B | ENSG00000159063 | ALG8 |
| ENSG00000110717 | NDUFS8 | ENSG00000163795 | ZNF513 |
| ENSG00000132341 | RAN | ENSG00000068394 | GPKOW |
| ENSG00000014123 | UFL1 | ENSG00000112659 | CUL9 |
| ENSG00000101191 | DIDO1 | ENSG00000187257 | RSBN1L |
| ENSG00000125952 | MAX | ENSG00000172167 | MTBP |
| ENSG00000163714 | U2SURP | ENSG00000176177 | ENTHD1 |
| ENSG00000253710 | ALG11 | ENSG00000166783 | KIAA0430 |
| ENSG00000104356 | POP1 | ENSG00000165006 | UBAP1 |
| ENSG00000130826 | DKC1 | ENSG00000188958 | UTS2B |
| ENSG00000198780 | FAM169A | ENSG00000136247 | ZDHHC4 |
| ENSG00000116688 | MFN2 | ENSG00000196363 | WDR5 |
| ENSG00000166166 | TRMT61A | ENSG00000116661 | FBXO2 |
| ENSG00000214517 | PPME1 | ENSG00000113013 | HSPA9 |
| ENSG00000077235 | GTF3C1 | ENSG00000090061 | CCNK |
| ENSG00000152240 | HAUS1 | ENSG00000051596 | THOC3 |
| ENSG00000063177 | RPL18 | ENSG00000140534 | TICRR |
| ENSG00000087157 | PGS1 | ENSG00000100216 | TOMM22 |
| ENSG00000100567 | PSMA3 | ENSG00000104613 | INTS10 |
| ENSG00000169371 | SNUPN | ENSG00000183474 | GTF2H2C |
| ENSG00000197651 | CCER1 | ENSG00000159128 | IFNGR2 |
| ENSG00000198900 | TOP1 | ENSG00000243725 | TTC4 |
| ENSG00000213551 | DNAJC9 | ENSG00000102898 | NUTF2 |
| ENSG00000152464 | RPP38 | ENSG00000170515 | PA2G4 |
| ENSG00000131467 | PSME3 | ENSG00000117036 | ETV3 |
| ENSG00000223510 | CDRT15 | ENSG00000196262 | PPIA |
| ENSG00000115053 | NCL | ENSG00000153037 | SRP19 |
| ENSG00000163041 | H3F3A | ENSG00000135801 | TAF5L |
| ENSG00000154813 | DPH3 | ENSG00000119414 | PPP6C |
| ENSG00000181873 | IBA57 | ENSG00000141013 | GAS8 |
| ENSG00000185591 | SP1 | ENSG00000113845 | TIMMDC1 |
| ENSG00000115355 | CCDC88A | ENSG00000175826 | CTDNEP1 |
| ENSG00000139350 | NEDD1 | ENSG00000117543 | DPH5 |
| ENSG00000108518 | PFN1 | ENSG00000204779 | FOXD4L5 |
| ENSG00000108264 | TADA2A | ENSG00000112249 | ASCC3 |
| ENSG00000134809 | TIMM10 | ENSG00000152256 | PDK1 |
| ENSG00000124383 | MPHOSPH10 | ENSG00000169217 | CD2BP2 |
| ENSG00000126067 | PSMB2 | ENSG00000166246 | C16orf71 |
| ENSG00000060688 | SNRNP40 | ENSG00000184164 | CRELD2 |
| ENSG00000042429 | MED17 | ENSG00000107960 | OBFC1 |
| ENSG00000196655 | TRAPPC4 | ENSG00000102384 | CENPI |
| ENSG00000107185 | RGP1 | ENSG00000079785 | DDX1 |
| ENSG00000124608 | AARS2 | ENSG00000133858 | ZFC3H1 |
| ENSG00000092098 | RNF31 | ENSG00000184110 | EIF3C |
| ENSG00000143569 | UBAP2L | ENSG00000146700 | SRCRB4D |
| ENSG00000233822 | HIST1H2BN | ENSG00000163380 | LMOD3 |
| ENSG00000171848 | RRM2 | ENSG00000116273 | PHF13 |
| ENSG00000183161 | FANCF | ENSG00000178229 | ZNF543 |
| ENSG00000166197 | NOLC1 | ENSG00000109475 | RPL34 |
| ENSG00000064703 | DDX20 | ENSG00000156469 | MTERFD1 |
| ENSG00000176102 | CSTF3 | ENSG00000155827 | RNF20 |
| ENSG00000106028 | SSBP1 | ENSG00000213741 | RPS29 |
| ENSG00000143315 | PIGM | ENSG00000165792 | METTL17 |
| ENSG00000136152 | COG3 | ENSG00000110844 | PRPF40B |
| ENSG00000134697 | GNL2 | ENSG00000100842 | EFS |
| ENSG00000159217 | IGF2BP1 | ENSG00000087495 | PHACTR3 |
| ENSG00000080608 | KIAA0020 | ENSG00000126261 | UBA2 |
| ENSG00000267368 | UPK3BL | ENSG00000136718 | IMP4 |
| ENSG00000130119 | GNL3L | ENSG00000091640 | SPAG7 |
| ENSG00000178950 | GAK | ENSG00000184886 | PIGW |
| ENSG00000205659 | LIN52 | ENSG00000184313 | MROH7 |
| ENSG00000123297 | TSFM | ENSG00000163481 | RNF25 |
| ENSG00000241370 | RPP21 | ENSG00000137054 | POLR1E |
| ENSG00000129351 | ILF3 | ENSG00000213085 | CCDC19 |
| ENSG00000174446 | SNAPC5 | ENSG00000171858 | RPS21 |
| ENSG00000132382 | MYBBP1A | ENSG00000130822 | PNCK |
| ENSG00000100664 | EIF5 | ENSG00000145216 | FIP1L1 |
| ENSG00000131469 | RPL27 | ENSG00000147130 | ZMYM3 |
| ENSG00000185128 | TBC1D3F | ENSG00000008086 | CDKL5 |
| ENSG00000111231 | GPN3 | ENSG00000165282 | PIGO |
| ENSG00000182774 | RPS17L | ENSG00000038358 | EDC4 |
| ENSG00000184779 | RPS17 | ENSG00000134684 | YARS |
| ENSG00000186871 | ERCC6L | ENSG00000153832 | FBXO36 |
| ENSG00000204568 | MRPS18B | ENSG00000140006 | WDR89 |
| ENSG00000108312 | UBTF | ENSG00000104643 | MTMR9 |
| ENSG00000167965 | MLST8 | ENSG00000151779 | NBAS |
| ENSG00000115241 | PPMIG | ENSG00000077348 | EXOSC5 |
| ENSG00000171103 | TRMT61B | ENSG00000131043 | AAR2 |
| ENSG00000116586 | LAMTOR2 | ENSG00000160193 | WDR4 |
| ENSG00000105793 | GTPBP10 | ENSG00000140691 | ARMC5 |
| ENSG00000100348 | TXN2 | ENSG00000141959 | PFKL |
| ENSG00000172757 | CFL1 | ENSG00000112053 | SLC26A8 |
| ENSG00000163634 | THOC7 | ENSG00000197111 | PCBP2 |
| ENSG00000008324 | SS18L2 | ENSG00000145191 | EIF2B5 |
| ENSG00000152404 | CWF19L2 | ENSG00000140988 | RPS2 |
| ENSG00000020129 | NCDN | ENSG00000181472 | ZBTB2 |

[0626] The gene symbols used in herein (including in Tables 3 and 4) are based on those found in the Human Gene Naming Committee (HGNC) which is searchable on the world-wide web at www.genenames.org. Ensembl IDs are provided for each gene symbol and are searchable world-wide web at www.ensembl.org.

[0627] The genes provided in Tables 3 and 4 are non-limiting examples of essential genes. Although additional essential genes will be apparent to the skilled artisan based on the knowledge in the art, the suitability of a particular gene for use according to the present disclosure can be determined, e.g., as discussed herein. For example, in some embodiments, a particular essential gene can be selected by analysis of potential off-target sites elsewhere in the genome. In some embodiments, only essential genes with one or more gRNA target sites that are unique in the human genome are selected for methods described herein. In some embodiments, only essential genes with one or more gRNA target sites that are found in only one other locus in the human genome are selected for methods described herein. In some embodiments, only essential genes with one or more gRNA target sites found in only two other loci in the human genome are selected for methods described herein.

[0628] Gene Product of Interest

[0629] The methods, systems and cells of the present disclosure enable the integration of a gene of interest at an essential gene of a cell. The gene of interest can encode any gene product of interest. In certain embodiments, a gene product of interest comprises an antibody, an antigen, an enzyme, a growth factor, a receptor (e.g., cell surface, cytoplasmic, or nuclear), a hormone, a lymphokine, a cytokine, a chemokine, a reporter, a functional fragment of any of the above, or a combination of any of the above.

[0630] In some embodiments, sequence for a gene product of interest can include, but is not limited to, prokaryotic sequences, cDNA from eukaryotic mRNA, genomic DNA sequences from eukaryotic (e.g., mammalian) DNA, and synthetic DNA sequences. For example, a gene of interest may encode an miRNA, an shRNA, a native polypeptide (i.e. a polypeptide found in nature) or fragment thereof; a variant polypeptide (i.e. a mutant of the native polypeptide having less than 100% sequence identity with the native polypeptide) or fragment thereof; an engineered polypeptide or peptide fragment, a therapeutic peptide or polypeptide, an imaging marker, a selectable marker, a degradation signal, and the like.

[0631] In some embodiments, a gene product of interest may be but is not limited to, e.g., a therapeutic protein or a gene product that confers a desired feature to the modified cell. In some embodiments, the transgene encodes a reporter protein, such as a fluorescent protein (e.g., as described herein) and an enzyme (e.g., luciferase and lacZ). In some embodiments, a reporter gene may aid the tracking of therapeutic cells once they are introduced to a subject.

[0632] In some embodiments, a gene product of interest may be but is not limited to therapeutic proteins such as a protein deficient in a patient. In some embodiments, for example, therapeutic proteins include, but are not limited to, those deficient in lysosomal storage disorders, such as alpha-L-iduronidase, arylsulfatase A, beta-glucocerebrosidase, acid sphingomyelinase, and alpha- and beta-galactosidase; and those deficient in hemophilia such as Factor VIII and Factor IX. Other examples of therapeutic proteins include, but are not limited to, antibodies or antibody fragments (e.g., scFv) such as those targeting pathogenic proteins (e.g., tau, alpha-synuclein, and beta-amyloid protein) and those targeting cancer cells (e.g., chimeric antigen receptors (CAR) as described herein)

[0633] In some embodiments, a gene product of interest may be a protein involved in immune regulation, or an immunomodulatory protein. In some embodiments, for example, such proteins are, PD-L1, CTLA-4, M-CSF, IL-4, IL-6, IL-10, IL-11, IL-13, TGF-01, and various isoforms thereof. By way of example, in some embodiments, a gene product of interest may be an isoform of HLA-G (e.g., HLA-G1, -G2, -G3, -G4, -G5, -G6, or -G7) or HLA-E; allogeneic cells expressing such a nonclassical MHC class I molecule may be less immunogenic and better tolerated when transplanted into a human patient who is not the source of the cells, making “universal” cell therapy possible.

[0634] In some embodiments, an exemplary gene product of interest is one that confers therapeutic value, e.g., a new therapeutic activity to the cell. In some embodiments, exemplary gene products of interest are polypeptides such as a chimeric antigen receptor (CAR) or antigen-binding fragment thereof, a T cell receptor or antigen binding fragment thereof, a non-naturally occurring variant of FcγRIII (CD16), interleukin 15 (IL-15), interleukin 15 receptor (IL-15R) or a variant thereof, interleukin 12 (IL-12), interleukin-12 receptor (IL-12R) or a variant thereof, human leukocyte antigen G (HLA-G), human leukocyte antigen E (HLA-E), leukocyte surface antigen cluster of differentiation CD47 (CD47), or any combination of two or more thereof. It is to be understood that the methods and cells of the present disclosure are not limited to any particular gene product of interest and that the selection of a gene product of interest will depend on the type of cell and ultimate use of the cells.

[0635] In some embodiments, a gene product of interest may be a cytokine. In some embodiments, expression of a cytokine from a modified cell generated using a method as described herein allows for localized dosing of the cytokine in vivo (e.g., within a subject in need thereof) and/or avoids a need to systemically administer a high-dose of the cytokine to a subject in need thereof (e.g., a lower dose of the cytokine may be administered). In some embodiments, the risk of dose-limiting toxicities associated with administering a cytokine is reduced while cytokine mediated cell functions are maintained. In some embodiments, to facilitate cell function without the need to additionally administer high-doses of soluble cytokines, a partial or full peptide of one or more of IL2, IL4, IL6, IL7, IL9, IL10, IL11, IL12, IL15, IL18, IL21, IFN-α, IFN-β and/or their respective receptor is introduced to the cell to enable cytokine signaling with or without the expression of the cytokine itself, thereby maintaining or improving cell growth, proliferation, expansion, and/or effector function with reduced risk of cytokine toxicities. In some embodiments, the introduced cytokine and/or its respective native or modified receptor for cytokine signaling are expressed on the cell surface. In some embodiments, the cytokine signaling is constitutively activated. In some embodiments, the activation of the cytokine signaling is inducible. In some embodiments, the activation of the cytokine signaling is transient and/or temporal. In some embodiments, a gene product if interest can be IL2, IL3, IL4, IL6, IL7, IL9, IL10, IL11, IL12, IL13, IL15, IL21, GM-CSF, IFN-α, IFN-b, IFN-g, erythropoietin, and/or the respective cytokine receptor. In some embodiments, a gene product of interest can be CCL3, TNFα, CCL23, IL2RB, IL12RB2, or IRF7.

[0636] In some embodiments, a gene product of interest can be a chemokine and/or the respective chemokine receptor. In some embodiments, a chemokine receptor can be, but is not limited to, CCR2, CCR5, CCR8, CX3C1, CX3CR1, CXCR1, CXCR2, CXCR3A, CXCR3B, or CXCR2. In some embodiments, a chemokine can be, but is not limited to, CCL7, CCL19, or CXL14.

[0637] As used herein, the term “chimeric antigen receptor” or “CAR” refers to a receptor protein that has been modified to give cells expressing the CAR the new ability to target a specific protein. Within the context of the disclosure, a cell modified to comprise a CAR or an antigen binding fragment may be used for immunotherapy to target and destroy cells associated with a disease or disorder, e.g., cancer cells. In some embodiments, the CAR can bind to any antigen of interest.

[0638] CARs of interest can include, but are not limited to, a CAR targeting mesothelin, EGFR, HER2 and/or MICA/B. To date, mesothelin-targeted CAR T-cell therapy has shown early evidence of efficacy in a phase I clinical trial of subjects having mesothelioma, non-small cell lung cancer, and breast cancer (NCT02414269). Similarly, CARs targeting EGFR, HER2 and MICA/B have shown promise in early studies (see, e.g., Li et al. (2018), Cell Death & Disease, 9(177); Han et al. (2018) Am. J. Cancer Res., 8(1):106-119; and Demoulin 2017) Future Oncology, 13(8); the entire contents of each of which are expressly incorporated herein by reference in their entireties).

[0639] CARs are well-known to those of ordinary skill in the art and include those described in, for example: WO13/063419 (mesothelin), WO15/164594 (EGFR), WO13/063419 (HER2), WO16/154585 (MICA and MICB), the entire contents of each of which are expressly incorporated herein by reference in their entireties. In some embodiments, a gene product of interest is any suitable CAR, NK cell specific CAR (NK-CAR), T cell specific CAR, or other binder that targets a cell, e.g., an NK cell, to a target cell, e.g., a cell associated with a disease or disorder, may be expressed in the modified cells provided herein. Exemplary CARs, and binders, include, but are not limited to, bi-specific antigen binding CARs, switchable CARs, dimerizable CARs, split CARs, multi-chain CARs, inducible CARs, CARs and binders that bind BCMA, androgen receptor, PSMA, PSCA, Muc1, HPV viral peptides (i.e., E7), EBV viral peptides, WT1, CEA, EGFR, EGFRvIII, IL13Rα2, GD2, CA125, EpCAM, Muc16, carbonic anhydrase IX (CAIX), CCR1, CCR4, carcinoembryonic antigen (CEA), CD3, CD5, CD7, CD10, CD19, CD20, CD22, CD23, CD24, CD26, CD30, CD33, CD34, CD35, CD38 CD41, CD44, CD44V6, CD49f, CD56, CD70, CD92, CD99, CD123, CD133, CD135, CD148, CD150, CD261, CD362, CLEC12A, MDM2, CYP1B, livin, cyclin 1, NKp30, NKp46, DNAM1, NKp44, CA9, PD1, PDL1, an antigen of cytomegalovirus (CMV), epithelial glycoprotein-40 (EGP-40), GPRC5D, receptor tyrosine kinases erb-B2,3,4, EGFIR, ERBB folate binding protein (FBP), fetal acetylcholine receptor (AChR), folate receptor-a, ganglioside G3 (GD3) human Epidermal Growth Factor Receptor 2 (HER-2), human telomerase reverse transcriptase (hTERT), ICAM-1, Integrin B7, Interleukin-13 receptor subunit alpha-2 (IL-13Ra2), K-light chain, kinase insert domain receptor (KDR), Lewis A (CA19.9), Lewis Y (Le Y), L1 cell adhesion molecule (LI-CAM), LILRB2, melanoma antigen family A 1 (MAGE-A1), MICA/B, Mucin 16 (Muc-16), NKCSI, NKG2D ligands, c-Met, cancer-testis antigen NYES0-1, oncofetal antigen (h5T4), PRAME, prostate stem cell antigen (PSCA), PRAME prostate-specific membrane antigen (PSMA), tumor-associated glycoprotein 72 (TAG-72), TIM-3, TRBCI, TRBC2, vascular endothelial growth factor R2 (VEGF-R2), Wilms tumor protein (WT-1), a pathogen antigen, or any suitable combination thereof. Additional suitable CARs and binders for use in the modified cells provided herein will be apparent to those of skill in the art based on the present disclosure and the general knowledge in the art. Such additional suitable CARs include those described in FIG. 3 of Davies and Maher, Adoptive T-cell Immunotherapy of Cancer Using Chimeric Antigen Receptor-Grafted T Cells, Archivum Immunologiae et Therapiae Experimentalis 58(3):165-78 (2010), the entire contents of which are incorporated herein by reference. Additional CARs suitable for methods described herein include: CD171-specific CARs (Park et al., Mol Ther (2007) 15(4):825-833), EGFRvIII-specific CARs (Morgan et al, Hum Gene Ther (2012) 23(10): 1043-1053), EGF-R-specific CARs (Kobold et al, J Natl Cancer Inst (2014) 107 (0:364), carbonic anhydrase K-specific CARs (Lamers et al., Biochem Soc Trans (2016) 44(3):951-959), FR-a-specific CARs (Kershaw et al., Clin Cancer Res (2006) 12(20):6106-6015), HER2-specific CARs (Ahmed et al., J Clin Oncol (2015) 33(15) 1688-1696; Nakazawa et al., Mol Ther (2011) 19(12):2133-2143; Ahmed et al., Mol Ther (2009) 17(10): 1779-1787; Luo et al., Cell Res (2016) 26(7):850-853; Morgan et al., Mol Ther (2010) 18(4):843-851; Grada et al., Mol Ther Nucleic Acids (2013) 9(2):32), CEA-specific CARs (Katz et al., Clin Cancer Res (2015) 21 (14):3149-3159), IL13Ra2-specific CARs (Brown et al., Clin Cancer Res (2015) 21(18):4062-4072), GD2-specific CARs (Louis et al., Blood (2011) 118(23):6050-6056; Caruana et al., Nat Med (2015) 21(5):524-529), ErbB2-specific CARs (Wilkie et al., J Clin Immunol (2012) 32(5): 1059-1070), VEGF-R-specific CARs (Chinnasamy et al., Cancer Res (2016) 22(2):436-447), FAP-specific CARs (Wang et al., Cancer Immunol Res (2014) 2(2): 154-166), MSLN-specific CARs (Moon et al., Clin Cancer Res (2011) 17(14):4719-30), CD19-specific CARs (Axicabtagene ciloleucel (Yescarta®) and Tisagenlecleucel (Kymriah®). See also, Li et al., J Hematol and Oncol (2018) 11(22), reviewing clinical trials of tumor-specific CARs.

[0640] As used herein, the term “CD16” refers to a receptor (FcγRIII) for the Fc portion of immunoglobulin G, and it is involved in the removal of antigen-antibody complexes from the circulation, as well as other antibody-dependent responses. In some embodiments, a CD16 protein is an hCD16 variant. In some embodiments an hCD16 variant is a high affinity F158V variant.

[0641] In some embodiments, a gene product of interest comprises a high affinity non-cleavable CD16 (hnCD16) or a variant thereof. In some embodiments, a high affinity non-cleavable CD16 or a variant thereof comprises at least any one of the followings: (a) F176V and S197P in ectodomain domain of CD16 (see e.g., Jing et al., Identification of an ADAM17 Cleavage Region in Human CD16 (FcγRIII) and the Engineering of a Non-Cleavable Version of the Receptor in NK Cells; PLOS One, 2015); (b) a full or partial ectodomain originated from CD64; (c) a non-native (or non-CD16) transmembrane domain; (d) a non-native (or non-CD16) intracellular domain; (e) a non-native (or nonCD16) signaling domain; (f) a non-native stimulatory domain; and (g) transmembrane, signaling, and stimulatory domains that are not originated from CD16, and are originated from a same or different polypeptide. In some embodiments, the non-native transmembrane domain is derived from CD3D, CD3E, CD3G, CD3s, CD4, CD5, CD5a, CD5b, CD27, CD2S, CD40, CDS4, CD166, 4-1BB, OX40, ICOS, ICAM-1, CTLA-4, PD-1, LAG-3, 2B4, BTLA, CD16, IL7, IL12, IL15, KIR2DL4, KIR2DS1, NKp30, NKp44, NKp46, NKG2C, NKG2D, or T cell receptor (TCR) polypeptide. In some embodiments, the non-native stimulatory domain is derived from CD27, CD2S, 4-1BB, OX40, ICOS, PD-1, LAG-3, 2B4, BTLA, DAP1O, DAP12, CTLA-4, or NKG2D polypeptide. In some other embodiments, the non-native signaling domain is derived from CD3s, 2B4, DAP1O, DAP12, DNAM1, CD137 (41BB), IL21, IL7, IL12, IL15, NKp30, NKp44, NKp46, NKG2C, or NKG2D polypeptide. In some particular embodiments of a hnCD16 variant, the non-native transmembrane domain is derived from NKG2D, the non-native stimulatory domain is derived from 2B4, and the non-native signaling domain is derived from CD3s. In some embodiments, a gene product of interest comprises a high affinity cleavable CD16 (hnCD16) or a variant thereof. In some embodiments, a high affinity cleavable CD16 or a variant thereof comprises at least F176V. In some embodiments, a high affinity cleavable CD16 or a variant thereof does not comprise an S197P amino acid substitution.

[0642] As used herein, the term “IL-15/IL15RA” or “Interleukin-15” (IL-15) refers to a cytokine with structural similarity to Interleukin-2 (IL-2). Like IL-2, IL-15 binds to and signals through a complex composed of IL-2/IL-15 receptor beta chain (CD122) and the common gamma chain (gamma-C, CD132). IL-15 is secreted by mononuclear phagocytes (and some other cells) following infection by virus(es). This cytokine induces cell proliferation of natural killer cells. IL-15 Receptor alpha (IL15RA) specifically binds IL-15 with very high affinity, and is capable of binding IL-15 independently of other subunits (see e.g., Mishra et al., Molecular pathways: Interleukin-15 signaling in health and in cancer, Clinical Cancer Research, 2014). It is suggested that this property allows IL-15 to be produced by one cell, endocytosed by another cell, and then presented to a third party cell. IL15RA is reported to enhance cell proliferation and expression of apoptosis inhibitor BCL2L1/BCL2-XL and BCL2. Exemplary sequences of IL-15 are provided in NG_029605.2, and exemplary sequences of IL-15RA are provided in NM_002189.4. In some embodiments, the IL-15R variant is a constitutively active IL-15R variant. In some embodiments, the constitutively active IL-15R variant is a fusion between IL-15R and an IL-15R agonist, e.g., an IL-15 protein or IL-15R-binding fragment thereof. In some embodiments, the IL-15R agonist is IL-15, or an IL-15R-binding variant thereof. Exemplary suitable IL-15R variants include, without limitation, those described, e.g., in Mortier E et al, 2006; The Journal of Biological Chemistry 2006 281: 1612-1619; or in Bessard-A et al., Mol Cancer Ther. 2009 September; 8(9):2736-45, the entire contents of each of which are incorporated by reference herein. In some embodiments, membrane bound trans-presentation of IL-15 is a more potent activation pathway than soluble IL-15 (see e.g., Imamura et al., Autonomous growth and increased cytotoxicity of natural killer cells expressing membrane-bound interleukin-15, Blood, 2014). In some embodiments, IL-15R expression comprises: IL15 and IL15Ra expression using a self-cleaving peptide; a fusion protein of IL15 and IL15Ra; an IL15/IL15Ra fusion protein with intracellular domain of IL15Ra truncated; a fusion protein of IL15 and membrane bound Sushi domain of IL15Ra; a fusion protein of IL15 and IL15Rβ; a fusion protein of IL15 and common receptor γC, wherein the common receptor γC is native or modified; and/or a homodimer of IL15Rβ.

[0643] As used herein, the term “IL-12” refers to interleukin-12, a cytokine that acts on T and natural killer cells. In some embodiments, a genetically engineered stem cell and/or progeny cell comprises a genetic modification that leads to expression of one or more of an interleukin 12 (IL12) pathway agonist, e.g., IL-12, interleukin 12 receptor (IL-12R) or a variant thereof (e.g., a constitutively active variant of IL-12R, e.g., an IL-12R fused to an IL-12R agonist (IL-12RA).

[0644] In some embodiments, the gene product of interest comprises a protein or polypeptide whose expression within a cell, e.g., a cell modified as described herein, enables the cell to inhibit or evade immune rejection after transplant or engraftment into a subject. In some embodiments, the gene product of interest is HLA-E, HLA-G, CTL4, CD47, or an associated ligand.

[0645] In some embodiments, the gene product of interest is a T cell receptor (TCR) or an antigen-binding fragment thereof, e.g., a recombinant TCR. In some embodiments, the recombinant TCR can bind to an antigen of interest, e.g., an antigen selected from, but not limited to, CD279, CD2, CD95, CD152, CD223CD272, TIM3, KIR, A2aR, SIRPa, CD200, CD200R, CD300, LPAS, NY-ESO, PD1, PDL1, or MAGE-A3/A6. In some embodiments, the TCR or antigen-binding fragment thereof can bind to a viral antigen, e.g., an antigen from hepatitis A, hepatitis B, hepatitis C (HCV), human papilloma virus (HPV) (e.g., HPV-16 (such as HPV-16 E6 or HPV-16 E7), HPV-18, HPV-31, HPV-33, or HPV-35), Epstein-Barr virus (EBV), human herpes virus 8 (HHV-8), human T-cell leukemia virus01 (HTLV-1), human T-cell leukemia virus-2 (HTLV-2) or a cytomegalovirus (CMV).

[0646] In some embodiments, the gene product of interest comprises a single-chain variable fragment that can bind to CD47, PD1, CTLA4, CD28, OX40, 4-1BB, and ligands thereof.

[0647] As used herein, the term “HLA-G” refers to the HLA non-classical class I heavy chain paralogues. This class I molecule is a heterodimer consisting of a heavy chain and a light chain (beta-2 microglobulin). The heavy chain is anchored in the membrane. HLA-G is expressed on fetal derived placental cells. HLA-G is a ligand for NK cell inhibitory receptor KIR2DL4, and therefore expression of this HLA by the trophoblast defends it against NK cell-mediated death. See e.g., Favier et al., Tolerogenic Function of Dimeric Forms of HLA-G Recombinant Proteins: A Comparative Study In Vivo PLOS One 2011, the entire contents of which are incorporated herein by reference. An exemplary sequence of HLA-G is set forth as NG_029039.1.

[0648] As used herein, the term “HLA-E” refers to the HLA class I histocompatibility antigen, alpha chain E, also sometimes referred to as MHC class I antigen E. The HLA-E protein in humans is encoded by the HLA-E gene. The human HLA-E is a non-classical MHC class I molecule that is characterized by a limited polymorphism and a lower cell surface expression than its classical paralogues. This class I molecule is a heterodimer consisting of a heavy chain and a light chain (beta-2 microglobulin). The heavy chain is anchored in the membrane. HLA-E binds a restricted subset of peptides derived from the leader peptides of other class I molecules. HLA-E expressing cells escape allogeneic responses and lysis by NK cells. See e.g., Geornalusse-G et al., Nature Biotechnology 2017 35 (8), the entire contents of which are incorporated herein by reference. Exemplary sequences of the HLA-E protein are provided in NM_005516.6.

[0649] As used herein, the term “CD47,” also sometimes referred to as “integrin associated protein” (IAP), refers to a transmembrane protein that in humans is encoded by the CD47 gene. CD47 belongs to the immunoglobulin superfamily, partners with membrane integrins, and also binds the ligands thrombospondin-1 (TSP-1) and signal-regulatory protein alpha (SIRPa). CD47 acts as a signal to macrophages that allows CD47-expressing cells to escape macrophage attack. See, e.g., Deuse-T, et al., Nature Biotechnology 2019 37: 252-258, the entire contents of which are incorporated herein by reference.

[0650] In some embodiments, a gene product of interest comprises a chimeric switch receptor (see e.g., WO2018094244A1—TGFBeta Signal Converter; Ankri et al., Human T cells Engineered to express a programmed death 1/28 costimulatory retargeting molecule display enhanced antitumor activity, The Journal of Immunology, Oct. 15, 2013, 191; Roth et al., Pooled knockin targeting for genome engineering of cellular immunotherapies, Cell. 2020 Apr. 30; 181(3):728-744.e21; and Boyerinas et al., A Novel TGF-β2/Interleukin Receptor Signal Conversion Platform That Protects CAR/TCR T Cells from TGF-β2-Mediated Immune Suppression and Induces T Cell Supportive Signaling Networks, Blood, 2017). In some embodiments, chimeric switch receptors are engineered cell-surface receptors comprising an extracellular domain from an endogenous cell-surface receptor and a heterologous intracellular signaling domain, such that ligand recognition by the extracellular domain results in activation of a different signaling cascade than that activated by the wild type form of the cell-surface receptor. In some embodiments, a chimeric switch receptor comprises an extracellular domain of an inhibitory cell-surface receptor fused to an intracellular domain that leads to the transmission of an activating signal rather than the inhibitory signal normally transduced by the inhibitory cell-surface receptor. In some embodiments, extracellular domains derived from cell-surface receptors known to inhibit immune effector cell activation can be fused to activating intracellular domains. In such an embodiment, engagement of the corresponding ligand may then activate signaling cascades that increase, rather than inhibit, the activation of the immune effector cell. For example, in some embodiments, a gene product of interest is a PD1-CD28 switch receptor, wherein the extracellular domain of PD1 is fused to the intracellular signaling domain of CD28 (See e.g.. Liu et al., Cancer Res 76:6 (2016), 1578-1590 and Moon et al., Molecular Therapy 22 (2014), S201). In some embodiments, encoding gene product of interest is or comprises the extracellular domain of CD200R and the intracellular signaling domain of CD28 (See Oda et al., Blood 130:22 (2017), 2410-2419).

[0651] In some embodiments, a gene product of interest is a reporter gene (e.g., GFP, mCherry, etc.). In some embodiments, a reporter gene is utilized to confirm the suitability of a knock-in cassette's expression capacity. In certain embodiments, a gene product of interest may be a colored or fluorescent protein such as: blue/UV proteins, e.g. TagBFP, mTagBFP2, Azurite, EBFP2, mKalamal, Sirius, Sapphire, T-Sapphire; cyan proteins, e.g. ECFP, Cerulean, SCFP3A, mTurquoise, mTurquoise2, monomeric Midoriishi-Cyan, TagCFP, mTFP1; green proteins, e.g. EGFP, Emerald, Superfolder GFP, Monomeric Azami Green, TagGFP2, mUKG, m Wasabi, Clover, mNeonGreen; yellow proteins, e.g. EYFP, Citrine, Venus, SYFP2, TagYFP; orange proteins, e.g. Monomeric Kusabira-Orange, mKOK, mK02, mOrange, m0range2; red proteins, e.g. mRaspberry, mStrawberry, mTangerine, tdTomato, TagRFP, TagRFP-T, mApple, mRuby, mRuby2; far-red proteins, e.g. mPlum, HcRed-Tandem, mKate2, mNeptune, NirFP; near-IR proteins, e.g. TagRFP657, IFP1.4, iRFP; long stokes shift proteins, e.g. mKeima Red, LSS-mKatel, LSS-mKate2, mBeRFP; photoactivatible proteins, e.g. PA-GFP, PAmCherryl, PATagRFP; photoconvertible proteins, e.g. Kaede (green), Kaede (red), KikGR1 (green), KikGR1 (red), PS-CFP2, PS-CFP2, mEos2 (green), mEos2 (red), mEos3.2 (green), mEos3.2 (red), PSmOrange, PSmOrange, photoswitchable proteins, e.g. Dronpa, and combinations thereof.

[0652] In some embodiments, a gene of interest provided herein can optionally include a sequence encoding a destabilizing domain (“a destabilizing sequence”) for temporal and/or spatial control of protein expression. Non-limiting examples of destabilizing sequences include sequences encoding a FK506 sequence, a dihydrofolate reductase (DHFR) sequence, or other exemplary destabilizing sequences.

[0653] In the absence of a stabilizing ligand, a protein sequence operatively linked to a destabilizing sequence is degraded by ubiquitination. In contrast, in the presence of a stabilizing ligand, protein degradation is inhibited, thereby allowing the protein sequence operatively linked to the destabilizing sequence to be actively expressed. As a positive control for stabilization of protein expression, protein expression can be detected by conventional means, including enzymatic, radiographic, colorimetric, fluorescence, or other spectrographic assays; fluorescent activating cell sorting (FACS) assays; immunological assays (e.g., enzyme linked immunosorbent assay (ELISA), radioimmunoassay (MA), and immunohistochemistry).

[0654] Additional examples of destabilizing sequences are known in the art. In some embodiments, the destabilizing sequence is a FK506- and rapamycin-binding protein (FKBP12) sequence, and the stabilizing ligand is Shield-1 (Sh1d1) (Banaszynski et al. (2012) Cell 126(5): 995-1004, which is incorporated in its entirety herein by reference). In some embodiments, a destabilizing sequence is a DHFR sequence, and a stabilizing ligand is trimethoprim (TMP) (Iwamoto et al. (2010) Chem Biol 17:981-988, which is incorporated in its entirety herein by reference). In some embodiments, a destabilizing domain is small molecule-assisted shutoff (SMASh), where a constitutive degron with a protease and its corresponding cleavage site derived from hepatitis C virus are combined. In some embodiments, a destabilizing domain comprises a HaloTag system, dTag system, and/or nanobody (see e.g., Luh et al., Prey for the proteasome: targeted protein degradation—a medicinal chemist's perspective; Angewandte Chemie, 2020).

[0655] In some embodiments, a destabilizing sequence can be used to temporally control a cell modified as described herein.

[0656] In some embodiments, a gene product of interest may be a suicide gene, (see e.g., Zarogoulidis et al., Suicide Gene Therapy for Cancer—Current Strategies; J Genet Syndr Gene Ther. 2013). In some embodiments, a suicide gene can use a gene-directed enzyme prodrug therapy (GDEPT) approach, a dimerization inducing approach, and/or therapeutic monoclonal antibody mediated approach. In some embodiments, a suicide gene is biologically inert, has an adequate bio-availability profile, an adequate bio-distribution profile, and can be characterized by intrinsic acceptable and/or absence of toxicity. In some embodiments, a suicide gene codes for a protein able to convert, at a cellular level, a non-toxic prodrug into a toxic product. In some embodiments, a suicide gene may improve the safety profile of a cell described herein (see e.g., Greco et al., Improving the safety of cell therapy with the TK-suicide gene; Front Pharmacology. 2015; Jones et al., Improving the safety of cell therapy products by suicide gene transfer; Frontiers Pharmacology, 2014). In some embodiments, a suicide gene is a herpes simplex virus thymidine kinase (HSV-TK). In some embodiments, a suicide gene is a cytosine deaminase (CD). In some embodiments, a suicide gene is an apoptotic gene (e.g., a caspase). In some embodiments, a suicide gene is dimerization inducing, e.g., comprising an inducible FAS (iFAS) or inducible Caspase9 (iCasp9)/AP1903 system. In some embodiments, a suicide gene is a CD20 antigen, and cells expressing such an antigen can be eliminated by clinical-grade anti-CD20 antibody administration. In some embodiments, a suicide gene is a truncated human EGFR polypeptide (huEGFRt) which confers sensitivity to a pharmaceutical-grade anti-EGFR monoclonal antibody, e.g., cetuximab. In some embodiments a suicide gene is a c-myc tag, which confers sensitivity to pharmaceutical-grade anti-cmyc antibodies.

[0657] In some embodiments, a gene product of interest may be a safety switch signal. In cell therapy, a safety switch can be used to stop proliferation of the genetically modified cells when their presence in the patient is not desired, for example, if the cells do not function properly, if planned therapeutic interventions change, or if the therapeutic goal has been achieved. In some embodiments, a safety switch may, for example, be a so-called suicide gene, or suicide switch, which upon administration of a pharmaceutical compound to the patient, will be activated or inactivated such that the cells enter apoptosis. Suicide genes, sometimes called suicide switches or safety switches can be triggered or activated by a cellular event, environmental event or chemical agent resulting in a cellular response by cells that have the suicide gene incorporated in their genome. In some embodiments, activation of a safety switch induces cellular apoptosis. In some embodiments, activation of the safety switch inhibits growth of cells incorporated with the safety switch. In some embodiments, a suicide switch may encode an enzyme not found in humans (e.g., a bacterial or viral enzyme) that converts a harmless substance into a toxic metabolite in the human cell. Examples of suicide switch include, without limitation, genes for thymidine kinases, cytosine deaminases, intracellular antibodies, telomerases, toxins, caspases (e.g., iCaspase9) and HSV-TK, and DNases. In some embodiments, the suicide gene may be a thymidine kinase (TK) gene from the Herpes Simplex Virus (HSV) and the suicide TK gene becomes toxic to the cell upon administration of ganciclovir, valganciclovir, famciclovir, or the like to the patient.

[0658] In some embodiments, a safety switch may be a rapamycin-inducible human Caspase 9-based (RapaCasp9) cellular suicide switch in which a truncated caspase 9 gene, which has its CARD domain removed, is linked after either the FRB (FKBP12-rapamycin binding) domain of mTOR, or FKBP12 (FK506-binding protein 12). Addition of the drug rapamycin enables heterodimerization of FRB and FKBP12 which subsequently causes homodimerization of truncated caspase 9 and induction of apoptosis. In some embodiments, using a two construct and/or biallelic approach as described herein, FRB and FKBP12 are separated onto different alleles by incorporating two donor constructs, one with one or more transgenes plus FRB, the other with one or more transgenes plus FKBP12. When referring to a safety switch in this application, it should be interpreted to include all components necessary for the function of the safety switch (e.g., FRB domain and FKBP12 domain and truncated caspase 9 gene are all components of, and make up, the safety switch).

Exemplary DHFR destabilizing amino acid sequence
SEQ ID NO: 160
MISLIAALAVDYVIGMENAMPWNLPADLAWFKRNTLNKPVIMGRHTWESIGRPLPGRKNIILSS
QPSTDDRVTWVKSVDEAIAACGDVPEIMVIGGGRVIEQFLPKAQKLYLTHIDAEVEGDTHFPDY
EPDDWESVFSEFHDADAQNSHSYCFEILERR
Exemplary DHFR destabilizing nucleotide sequence
SEQ ID NO: 161
GGTACCATCAGTCTGATTGCGGCGTTAGCGGTAGATTACGTTATCGGCATGGAAAACGCCATGC
CGTGGAACCTGCCTGCCGATCTCGCCTGGTTTAAACGCAACACCTTAAATAAACCCGTGATTAT
GGGCCGCCATACCTGGGAATCAATCGGTCGTCCGTTGCCAGGACGCAAAAATATTATCCTCAGC
AGTCAACCGAGTACGGACGATCGCGTAACGTGGGTGAAGTCGGTGGATGAAGCCATCGCGGCGT
GTGGTGACGTACCAGAAATCATGGTGATTGGCGGCGGTCGCGTTATTGAACAGTTCTTGCCAAA
AGCGCAAAAACTGTATCTGACGCATATCGACGCAGAAGTGGAAGGCGACACCCATTTCCCGGAT
TACGAGCCGGATGACTGGGAATCGGTATTCAGCGAATTCCACGATGCTGATGCGCAGAACTCTC
ACAGCTATTGCTTTGAGATTCTGGAGCGGCGATAA
Exemplary destabilizing domain
SEQ ID NO: 162
ATCAGTCTGATTGCGGCGTTAGCGGTAGATTACGTTATCGGCATGGAAAACGCCATGCCGTGGA
ACCTGCCTGCCGATCTCGCCTGGTTTAAACGCAACACCTTAAATAAACCCGTGATTATGGGCCG
CCATACCTGGGAATCAATCGGTCGTCCGTTGCCAGGACGCAAAAATATTATCCTCAGCAGTCAA
CCGAGTACGGACGATCGCGTAACGTGGGTGAAGTCGGTGGATGAAGCCATCGCGGCGTGTGGTG
ACGTACCAGAAATCATGGTGATTGGCGGCGGTCGCGTTATTGAACAGTTCTTGCCAAAAGCGCA
AAAACTGTATCTGACGCATATCGACGCAGAAGTGGAAGGCGACACCCATTTCCCGGATTACGAG
CCGGATGACTGGGAATCGGTATTCAGCGAATTCCACGATGCTGATGCGCAGAACTCTCACAGCT
ATTGCTTTGAGATTCTGGAGCGGCGA
Exemplary FKBP12 destabilizing peptide amino acid sequence
SEQ ID NO: 163
MGVEKQVIRPGNGPKPAPGQTVTVHCTGFGKDGDLSQKFWSTKDEGQKPFSFQIGKGAVIKGWD
EGVIGMQIGEVARLRCSSDYAYGAGGFPAWGIQPNSVLDFEIEVLSVQ

[0659] In some embodiments, a coding sequence for a single gene product of interest may be included in a knock-in cassette. In some embodiments, coding sequences for two gene products of interest may be included in a single knock-in cassette; in some embodiments, this may be referred to as a bicistronic or multicistronic construct. In some embodiments, coding sequences for more than two gene products of interest may be included in a single knock-in cassette; in some embodiments, this may be referred to as a multicistronic construct. In some embodiments, when more than one coding sequence for more than one gene product of interest is included in a knock-in cassette, these sequences may have a linker sequence connecting them. Linker sequences are generally known in the art, an exemplary linker sequence is identified in SEQ ID NO: 164. In some embodiments, where more than one coding sequence for more than one gene product of interest is included in a knock-in cassette, these sequences may be connected by a linker sequence, an IRES, and/or 2A element.

[0660] In some embodiments, an oligonucleotide encoding a gene product of interest comprises or consists of the sequence of any one of SEQ ID NOs: 161, 162, or 164-182. In some embodiments, a gene product of interest comprises or consists of a sequence that is at least 85%, 90%, 95%, 98% or 99% identical to any one of SEQ ID NOs: 161, 162, or 164-182.

Exemplary linker sequence
SEQ ID NO: 164
TCTGGCGGAGGAAGCGGAGGCGGAGGATCTGGTGGTGGTGGATCTGGCGGCGGTGGTAGTGGCG
GAGGTTCTCTGCAA
exemplary CD16 knock-in cassette sequence
SEQ ID NO: 165
ATGTGGCAACTGCTGCTGCCTACAGCTCTGCTGCTTCTGGTGTCTGCCGGCATGAGAACCGAGG
ATCTGCCTAAGGCCGTGGTGTTCCTGGAACCTCAGTGGTACAGAGTGCTGGAAAAGGACAGCGT
GACCCTGAAGTGCCAGGGCGCCTATTCTCCCGAGGACAATAGCACCCAGTGGTTCCACAACGAG
AGCCTGATCAGCAGCCAGGCCAGCAGCTACTTTATCGATGCCGCCACCGTGGACGACAGCGGCG
AGTACAGATGCCAGACCAATCTGAGCACCCTGAGCGACCCTGTGCAGCTGGAAGTGCACATTGG
ATGGTTGCTGCTGCAAGCCCCTAGATGGGTGTTCAAAGAAGAGGACCCCATCCACCTGAGATGC
CACTCTTGGAAGAACACAGCCCTGCACAAAGTGACCTACCTGCAGAACGGCAAGGGCAGAAAGT
ACTTCCACCACAACAGCGACTTCTACATCCCCAAGGCCACACTGAAGGACTCCGGCTCCTACTT
CTGCAGAGGCCTGGTCGGCAGCAAGAACGTGTCCAGCGAGACAGTGAACATCACCATCACACAG
GGCCTCGCCGTGTCTACCATCAGCAGCTTTTTCCCACCTGGCTATCAGGTGTCCTTCTGCCTGG
TCATGGTGCTGCTGTTCGCCGTGGATACCGGCCTGTACTTCAGCGTCAAGACCAACATCCGGTC
CAGCACCAGAGACTGGAAGGACCACAAGTTCAAGTGGCGGAAGGACCCTCAGGACAAGTAA
exemplary CD16 knock-in cassette sequence
SEQ ID NO: 166
ATGTGGCAGCTGTTGCTGCCGACAGCCCTCCTGTTGCTGGTCTCCGCTGGCATGAGAACCGAGG
ATCTGCCTAAGGCCGTGGTGTTCCTGGAACCTCAGTGGTACAGAGTGCTGGAAAAGGACAGCGT
GACCCTGAAGTGCCAGGGCGCCTATTCTCCCGAGGACAATAGCACCCAGTGGTTCCACAACGAG
AGCCTGATCAGCAGCCAGGCCAGCAGCTACTTTATCGATGCCGCCACCGTGGACGACAGCGGCG
AGTACAGATGCCAGACCAATCTGAGCACCCTGAGCGACCCTGTGCAGCTGGAAGTGCACATTGG
ATGGTTGCTGCTGCAAGCCCCTAGATGGGTGTTCAAAGAAGAGGACCCCATCCACCTGAGATGC
CACTCTTGGAAGAACACAGCCCTGCACAAAGTGACCTACCTGCAGAACGGCAAGGGCAGAAAGT
ACTTCCACCACAACAGCGACTTCTACATCCCCAAGGCCACACTGAAGGACTCCGGCTCCTACTT
CTGCAGAGGCCTGGTCGGCAGCAAGAACGTGTCCAGCGAGACAGTGAACATCACCATCACACAG
GGCCTCGCCGTGTCTACCATCAGCAGCTTTTTCCCACCTGGCTATCAGGTGTCCTTCTGCCTGG
TCATGGTGCTGCTGTTCGCCGTGGATACCGGCCTGTACTTCAGCGTCAAGACCAACATCCGGTC
CAGCACCAGAGACTGGAAGGACCACAAGTTCAAGTGGCGGAAGGACCCTCAGGACAAG
exemplary CD47 knock-in cassette sequence
SEQ ID NO: 167
ATGTGGCCCCTGGTAGCGGCGCTGTTGCTGGGCTCGGCGTGCTGCGGATCAGCTCAGCTACTAT
TTAATAAAACAAAATCTGTAGAATTCACGTTTTGTAATGACACTGTCGTCATTCCATGCTTTGT
TAGTAATATGGAGGCACAAAACACTAGTGAAGTATACGTAAAGTGGAAATTTAAAGGAAGAGAT
ATTTACACCTTTGATGGAGCTCTAAACAAGTCCACTGTCCCCACTGACTTTAGTAGTGCAAAAA
TTGAAGTCTCACAATTAGTAAAAGGAGATGCCTCTTTGAAGATGGATAAGAGTGATGCTGTCTC
ACACACAGGAAACTAGACTTGTGAAGTAACAGAATTAACCAGAGAAGGTGAAACGATCATCGAG
CTAAAATATCGTGTTGTTTCATGGTTTTCTCCAAATGAAAATATTCTTATTGTTATTTTCCCAA
TTTTTGCTATACTCCTGTTCTGGGGACAGTTTGGTATTAAAACACTTAAATATAGATCCGGTGG
TATGGATGAGAAAACAATTGCTTTACTTGTTGCTGGACTAGTGATCACTGTCATTGTCATTGTT
GGAGCCATTCTTTTCGTCCCAGGTGAATATTCATTAAAGAATGCTACTGGCCTTGGTTTAATTG
TGAGTTCTACAGGGATATTAATATTAGTTGAGTAGTATGTGTTTAGTACAGCGATTGGATTAAC
CTCCTTCGTCATTGCCATATTGGTTATTCAGGTGATAGCCTATATCCTCGCTGTGGTTGGACTG
AGTCTCTGTATTGCGGCGTGTATACCAATGCATGGCCCTCTTCTGATTTCAGGTTTGAGTATCT
TAGCTCTAGCACAATTAGTTGGACTAGTTTATATGAAATTTGTGGCTTCCAATCAGAAGACTAT
ACAACCTCCTAGGAAAGCTGTAGAGGAACCCCTTAATGCATTCAAAGAATCAAAAGGAATGATG
AATGATGAATGA
exemplary IL15 knock-in cassette sequence
SEQ ID NO: 168
AATTGGGTCAACGTGATCAGCGACCTGAAGAAGATCGAGGACCTGATCCAGAGCATGCACATCG
ACGCCACACTGTACACCGAGTCCGATGTGCACCCTAGCTGCAAAGTGACCGCCATGAAGTGCTT
TCTGCTGGAACTGCAAGTGATCAGCCTGGAAAGCGGCGACGCCAGCATCCACGATACCGTGGAA
AACCTGATCATCCTGGCCAACAACAGCCTGAGCAGCAACGGCAATGTGACCGAGAGCGGCTGCA
AAGAGTGCGAGGAACTGGAAGAGAAGAACATCAAAGAGTTCCTCCAGAGCTTCGTCCACATCGT
GCAGATGTTCATCAACACCAGC
exemplary IgE-IL15 knock-in cassette sequence
SEQ ID NO: 169
ATGGATTGGACCTGGATCCTGTTTCTGGTGGCCGCTGCCACAAGAGTGCACAGCAATTGGGTCA
ACGTGATCAGCGACCTGAAGAAGATCGAGGACCTGATCCAGAGCATGCACATCGACGCCACACT
GTACACCGAGTCCGATGTGCACCCTAGCTGCAAAGTGACCGCCATGAAGTGCTTTCTGCTGGAA
CTGCAAGTGATCAGCCTGGAAAGCGGCGACGCCAGCATCCACGATACCGTGGAAAACCTGATCA
TCCTGGCCAACAACAGCCTGAGCAGCAACGGCAATGTGACCGAGAGCGGCTGCAAAGAGTGCGA
GGAACTGGAAGAGAAGAACATCAAAGAGTTCCTCCAGAGCTTCGTCCACATCGTGCAGATGTTC
ATCAACACCAGC
exemplary IgE-IL15 pro-peptide cargo sequence
SEQ ID NO: 170
ATGGACTGGACCTGGATTCTGTTCCTGGTCGCGGCTGCAACGCGAGTCCATAGCGGTATCCATG
TTTTTATTCTTGGGTGTTTTTCTGCTGGGCTGCCTAAGACCGAGGCCAACTGGGTAAATGTCAT
CAGTGACCTCAAGAAAATAGAAGACCTTATACAAAGCATGCACATTGATGCTACTCTCTACACT
GAGTCAGATGTACATCCCTCATGCAAAGTGACGGCCATGAAATGTTTCCTCCTCGAACTTCAAG
TCATATCTCTGGAAAGTGGCGACGCGTCCATCCACGACACGGTCGAAAACCTGATAATACTCGC
TAATAATAGTCTCTCTTCAAATGGTAACGTAACCGAGTCAGGTTGCAAAGAGTGCGAAGAGTTG
GAAGAAAAAAACATAAAGGAGTTCCTGCAAAGTTTCGTGCACATTGTGCAGATGTTCATTAATA
CCTCT
exemplary IL15Rα cargo sequence
SEQ ID NO: 171
ATCACCTGTCCTCCACCTATGAGCGTGGAACACGCCGACATCTGGGTCAAGAGCTACAGCCTGT
ACAGCAGAGAGCGGTACATCTGCAACAGCGGCTTCAAGAGAAAGGCCGGCACAAGCAGCCTGAC
CGAGTGTGTGCTGAACAAGGCCACAAACGTGGCCCACTGGACCACACCTAGCCTGAAGTGCATC
AGAGATCCCGCTCTGGTTCATCAGAGGCCTGCCCCTCCATCTACAGTGACAACAGCTGGCGTGA
CCCCTCAGCCTGAGTCTCTGTCTCCATCTGGAAAAGAGCCTGCCGCCAGCTCTCCCAGCTCTAA
CAATACTGCTGCCACCACAGCCGCTATCGTGCCTGGATCTCAGCTGATGCCTAGCAAGAGCCCT
AGCACCGGCACAACAGAGATCAGCTCTCACGAGAGCAGCCACGGAACACCTTCTCAGACCACCG
CCAAGAATTGGGAGCTGACAGCCTCTGCCTCTCATCAGCCACCTGGCGTGTACCCACAGGGCCA
CTCTGATACAACAGTGGCCATCAGCACCAGCACCGTTCTGCTGTGTGGCCTGTCTGCTGTTAGC
CTGCTGGCCTGCTACCTGAAGTCTAGACAGACACCTCCTCTGGCCAGCGTGGAAATGGAAGCCA
TGGAAGCTCTGCCTGTCACATGGGGCACCAGCAGCAGAGATGAGGACCTCGAGAATTGCAGCCA
CCACCTG
exemplary mbIL-15 cargo sequence
SEQ ID NO: 172
ATGGATTGGACCTGGATCCTGTTTCTGGTGGCCGCTGCCACAAGAGTGCACAGCAATTGGGTCA
ACGTGATCAGCGACCTGAAGAAGATCGAGGACCTGATCCAGAGCATGCACATCGACGCCACACT
GTACACCGAGTCCGATGTGCACCCTAGCTGCAAAGTGACCGCCATGAAGTGCTTTCTGCTGGAA
CTGCAAGTGATCAGCCTGGAAAGCGGCGACGCCAGCATCCACGATACCGTGGAAAACCTGATCA
TCCTGGCCAACAACAGCCTGAGCAGCAACGGCAATGTGACCGAGAGCGGCTGCAAAGAGTGCGA
GGAACTGGAAGAGAAGAACATCAAAGAGTTCCTCCAGAGCTTCGTCCACATCGTGCAGATGTTC
ATCAACACCAGCTCTGGCGGAGGAAGCGGAGGCGGAGGATCTGGTGGTGGTGGATCTGGCGGCG
GTGGTAGTGGCGGAGGTTCTCTGCAAATCACCTGTCCTCCACCTATGAGCGTGGAACACGCCGA
CATCTGGGTCAAGAGCTACAGCCTGTACAGCAGAGAGCGGTACATCTGCAACAGCGGCTTCAAG
AGAAAGGCCGGCACAAGCAGCCTGACCGAGTGTGTGCTGAACAAGGCCACAAACGTGGCCCACT
GGACCACACCTAGCCTGAAGTGCATCAGAGATCCCGCTCTGGTTCATCAGAGGCCTGCCCCTCC
ATCTACAGTGACAACAGCTGGCGTGACCCCTCAGCCTGAGTCTCTGTCTCCATCTGGAAAAGAG
CCTGCCGCCAGCTCTCCCAGCTCTAACAATACTGCTGCCACCACAGCCGCTATCGTGCCTGGAT
CTCAGCTGATGCCTAGCAAGAGCCCTAGCACCGGCACAACAGAGATCAGCTCTCACGAGAGCAG
CCACGGAACACCTTCTCAGACCACCGCCAAGAATTGGGAGCTGACAGCCTCTGCCTCTCATCAG
CCACCTGGCGTGTACCCACAGGGCCACTCTGATACAACAGTGGCCATCAGCACCAGCACCGTTC
TGCTGTGTGGCCTGTCTGCTGTTAGCCTGCTGGCCTGCTACCTGAAGTCTAGACAGACACCTCC
TCTGGCCAGCGTGGAAATGGAAGCCATGGAAGCTCTGCCTGTCACATGGGGCACCAGCAGCAGA
GATGAGGAGCTCGAGAATTGGAGCCACCACCTG
exemplary mbIL-15 cargo sequence
SEQ ID NO: 173
ATGGACTGGACCTGGATTCTGTTCCTGGTCGCGGCTGCAACGCGAGTCCATAGCGGTATCCATG
TTTTTATTCTTGGGTGTTTTTCTGCTGGGCTGCCTAAGACCGAGGCCAACTGGGTAAATGTCAT
GAGTGAGCTCAAGAAAATAGAAGACCTTATACAAAGCATGCACATTGATGCTAGTCTCTACACT
GAGTCAGATGTACATCCCTCATGCAAAGTGACGGCCATGAAATGTTTCCTCCTCGAACTTCAAG
TCATATCTCTGGAAAGTGGCGACGCGTCCATCCACGACACGGTCGAAAACCTGATAATACTCGC
TAATAATAGTCTCTCTTCAAATGGTAACGTAACCGAGTGAGGTTGCAAAGAGTGCGAAGAGTTG
GAAGAAAAAAACATAAAGGAGTTCCTGCAAAGTTTCGTGCACATTGTGCAGATGTTCATTAATA
CCTCTAGCGGCGGAGGATCAGGTGGCGGTGGAAGCGGAGGTGGAGGCTCCGGTGGAGGAGGTAG
TGGCGGAGGTTCTCTTCAAATAACTTGTCCTCCACCGATGTCCGTAGAACATGCGGATATTTGG
GTAAAATCCTATAGCTTGTACAGCCGAGAGCGGTATATCTGCAACAGCGGCTTCAAGCGGAAGG
CCGGCACAAGCAGCCTGACCGAGTGCGTGCTGAACAAGGCCACCAACGTGGCCCACTGGACCAC
CCCTAGCCTGAAGTGCATCAGAGATCCCGCCCTGGTGCATCAGCGGCCTGCCCCTCCAAGCACA
GTGACAACAGCTGGCGTGACCCCCCAGCCTGAGAGCCTGAGCCCTTCTGGAAAAGAGCCTGCCG
CCAGCAGCCCCAGCAGCAACAATACTGCCGCCACCACAGCCGCCATCGTGCCTGGATCTCAGCT
GATGCCCAGCAAGAGCCCTAGCACCGGCACCACCGAGATCAGCAGCCACGAGTCTAGCCACGGC
ACCCCATCTCAGACCACCGCCAAGAACTGGGAGCTGACAGCCAGCGCCTCTCACCAGCCTCCAG
GCGTGTACCCTCAGGGCCACAGCGATACCACAGTGGCCATCAGCACCTCCACCGTGCTGCTGTG
TGGACTGAGCGCCGTGTCACTGCTGGCCTGCTACCTGAAGTCCAGACAGACCCCTCCACTGGCC
AGCGTGGAAATGGAAGCCATGGAAGCACTGCCCGTGACCTGGGGCACCAGCTCCAGAGATGAGG
ATCTGGAAAACTGCTCCCACCACCTG
exemplary multi cistronic CD16, mbIL-15 cargo sequence
SEQ ID NO: 174
ATGTGGCAGCTGTTGCTGCCGACAGCCCTCCTGTTGCTGGTCTCCGCTGGCATGAGAACCGAGG
ATCTGCCTAAGGCCGTGGTGTTCCTGGAACCTCAGTGGTACAGAGTGCTGGAAAAGGACAGCGT
GACCCTGAAGTGCCAGGGCGCCTATTCTCCCGAGGACAATAGCACCCAGTGGTTCCACAACGAG
AGCCTGATCAGCAGCCAGGCCAGCAGCTACTTTATCGATGCCGCCACCGTGGACGACAGCGGCG
AGTACAGATGCCAGACCAATCTGAGCACCCTGAGCGACCCTGTGCAGCTGGAAGTGCACATTGG
ATGGTTGCTGCTGCAAGCCCCTAGATGGGTGTTCAAAGAAGAGGACCCCATCCACCTGAGATGC
CACTCTTGGAAGAACACAGCCCTGCACAAAGTGACCTACCTGCAGAACGGCAAGGGCAGAAAGT
ACTTCCACCACAACAGCGACTTCTACATCCCCAAGGCCACACTGAAGGACTCCGGCTCCTACTT
CTGCAGAGGCCTGGTCGGCAGCAAGAACGTGTCCAGCGAGACAGTGAACATCACCATCACACAG
GGCCTCGCCGTGTCTACCATCAGCAGCTTTTTCCCACCTGGCTATCAGGTGTCCTTCTGCCTGG
TCATGGTGCTGCTGTTCGCCGTGGATACCGGCCTGTACTTCAGCGTCAAGACCAACATCCGGTC
CAGCACCAGAGACTGGAAGGACCACAAGTTCAAGTGGCGGAAGGACCCTCAGGACAAGGGAAGC
GGAGCCACAAACTTCTCTCTGCTGAAGCAGGCAGGAGATGTTGAAGAAAACCCTGGACCTATGG
ATTGGACCTGGATCCTGTTTCTGGTGGCCGCTGCCACAAGAGTGCACAGCAATTGGGTCAACGT
GATCAGCGACCTGAAGAAGATCGAGGACCTGATCCAGAGCATGCACATCGACGCCACACTGTAC
ACCGAGTCCGATGTGCACCCTAGCTGCAAAGTGACCGCCATGAAGTGCTTTCTGCTGGAACTGC
AAGTGATCAGCCTGGAAAGCGGCGACGCCAGCATCCACGATACCGTGGAAAACCTGATCATCCT
GGCCAACAACAGCCTGAGCAGCAACGGCAATGTGACCGAGAGCGGCTGCAAAGAGTGCGAGGAA
CTGGAAGAGAAGAACATCAAAGAGTTCCTCCAGAGCTTCGTCCACATCGTGCAGATGTTCATCA
ACACCAGCTCTGGCGGAGGAAGCGGAGGCGGAGGATCTGGTGGTGGTGGATCTGGCGGCGGTGG
TAGTGGCGGAGGTTCTCTGCAAATCACCTGTCCTCCACCTATGAGCGTGGAACACGCCGACATC
TGGGTCAAGAGCTACAGCCTGTACAGCAGAGAGCGGTACATCTGCAACAGCGGCTTCAAGAGAA
AGGCCGGCACAAGCAGCCTGACCGAGTGTGTGCTGAACAAGGCCACAAACGTGGCCCACTGGAC
CACACCTAGCCTGAAGTGCATCAGAGATCCCGCTCTGGTTCATCAGAGGCCTGCCCCTCCATCT
ACAGTGACAACAGCTGGCGTGACCCCTCAGCCTGAGTCTCTGTCTCCATCTGGAAAAGAGCCTG
CCGCCAGCTCTCCCAGCTCTAACAATACTGCTGCCACCACAGCCGCTATCGTGCCTGGATCTCA
GCTGATGCCTAGCAAGAGCCCTAGCACCGGCACAACAGAGATCAGCTCTCACGAGAGCAGCCAC
GGAACACCTTCTCAGACCACCGCCAAGAATTGGGAGCTGACAGCCTCTGCCTCTCATCAGCCAC
CTGGCGTGTACCCACAGGGCCACTCTGATACAACAGTGGCCATCAGCACCAGCACCGTTCTGCT
GTGTGGCCTGTCTGCTGTTAGCCTGCTGGCCTGCTACCTGAAGTCTAGACAGACACCTCCTCTG
GCCAGCGTGGAAATGGAAGCCATGGAAGCTCTGCCTGTCACATGGGGCACCAGCAGCAGAGATG
AGGAGCTCGAGAATTGGAGCCACCACCTG
exemplary CD19 CAR cargo sequence
SEQ ID NO: 175
ATGCTTCTCCTGGTGACAAGCCTTCTGCTCTGTGAGTTACCACACCCAGCATTCCTCCTGATCC
CAGACATCCAGATGACACAGACTAGATCCTCCCTGTCTGCCTCTCTGGGAGACAGAGTCACCAT
CAGTTGCAGGGCAAGTCAGGACATTAGTAAATATTTAAATTGGTATCAGCAGAAACCAGATGGA
ACTGTTAAACTCCTGATCTACCATACATCAAGATTAGACTCAGGAGTCCCATCAAGGTTCAGTG
GCAGTGGGTCTGGAACAGATTATTCTCTCACCATTAGCAACCTGGAGCAAGAAGATATTGCCAC
TTACTTTTGCCAACAGGGTAATACGCTTCCGTACACGTTCGGAGGGGGGACTAAGTTGGAAATA
ACAGGCTCCACCTCTGGATCCGGCAAGCCCGGATCTGGCGAGGGATCCACCAAGGGCGAGGTGA
AACTGCAGGAGTCAGGACCTGGCCTGGTGGCGCCCTCACAGAGCCTGTCCGTCACATGCACTGT
CTCAGGGGTCTCATTACCCGACTATGGTGTAAGCTGGATTCGCCAGCCTCCACGAAAGGGTCTG
GAGTGGCTGGGAGTAATATGGGGTAGTGAAACCACATACTATAATTCAGCTCTCAAATCCAGAC
TGAGCATCATCAAGGACAACTCCAAGAGCCAAGTTTTCTTAAAAATGAACAGTCTGCAAACTGA
TGACACAGCCATTTACTACTGTGCCAAACATTATTACTACGGTGGTAGCTATGCTATGGACTAC
TGGGGTCAAGGAACCTCAGTCACCGTCTCCTCAGCGGCCGCAATTGAAGTTATGTATCCTCCTC
CTTACCTAGACAATGAGAAGAGCAATGGAACCATTATCCATGTGAAAGGGAAACACCTTTGTCC
AAGTCCCCTATTTCCCGGACCTTCTAAGCCCTTTTGGGTGCTGGTGGTGGTTGGGGGAGTCCTG
GCTTGCTATAGCTTGCTAGTAACAGTGGCCTTTATTATTTTCTGGGTGAGGAGTAAGAGGAGCA
GGCTCCTGCACAGTGACTACATGAACATGACTCCCCGCCGCCCCGGGCCCACCCGCAAGCATTA
CCAGCCCTATGCCCCACCACGCGACTTCGCAGCCTATCGCTCCAGAGTGAAGTTCAGCAGGAGC
GCAGACGCCCCCGCGTACCAGCAGGGCCAGAACCAGCTCTATAACGAGCTCAATCTAGGACGAA
GAGAGGAGTACGATGTTTTGGACAAGAGACGTGGCCGGGACCCTGAGATGGGGGGAAAGCCGAG
AAGGAAGAACCCTCAGGAAGGCCTGTACAATGAACTGCAGAAAGATAAGATGGCGGAGGCCTAC
AGTGAGATTGGGATGAAAGGCGAGCGCCGGAGGGGCAAGGGGCACGATGGCCTTTACCAGGGTC
TCAGTACAGCCACCAAGGACACCTACGACGCCCTTCACATGCAGGCCCTGCCCCCTCGCTAA
exemplary EGFR CAR cargo sequence
SEQ ID NO: 176
ATGGCACTCCCCGTCACCGCCCTTCTCTTGCCCCTCGCCCTGCTGCTGCATGCTGCCAGGCCCA
TGGACGAAGTGCAGCTCGTGGAGTCCGGTGGAGGACTCGTCCAACCGGGCGGATCCCTTCGCTT
GTCCTGCGCCGCATCAGGCTTCAGCTTCACCAACTATGGCGTCCACTGGGTCAGACAGGCCCCC
GGAAAGGGACTGGAATGGGTGTCCGTGATCTGGAGCGGCGGGAACACCGACTACAACACCTCCG
TGAAGGGCCGGTTCACTATTAGCCGCGACAACTCCAAGAACACTCTGTACCTCCAAATGAACTC
CCTGAGGGCCGAAGATACTGCTGTGTACTATTGCGCGAGAGCCCTGACCTACTACGACTACGAG
TTCGCGTACTGGGGCCAGGGGACTCTCGTGACCGTGTCCAGCGGTGGTGGAGGTTCCGGAGGCG
GAGGTTCTGGTGGCGGGGGATCAGAAATCGTGCTGACTCAGTCCCCTGCGACCTTGTCCCTGAG
CCCTGGAGAACGGGCCACCCTGAGCTGTAGAGCCAGCCAGAGCATCGGGACAAATATTCACTGG
TACCAGCAGAAACCCGGACAAGCACCACGGCTGCTGATCTACTACGCCTCCGAGTCGATTTCCG
GAATCCCGGCTCGCTTTTCGGGGTCTGGATCGGGAACGGACTTCACTCTGACCATCTCGTCGCT
GGAACCCGAGGATTTCGCCGTGTACTACTGCCAACAGAACAACAATTGGCCGACCACGTTCGGC
CAGGGCACCAAGCTCGAGATTAAGGGATCACTGGAAGCGGCCGCAACCACAACACCTGCTCCAA
GGCCCCCCACACCCGCTCCAACTATAGCCAGCCAACCATTGAGCCTCAGACCTGAAGCTTGCAG
GCCCGCAGCAGGAGGCGCCGTCCATACGCGAGGCCTGGACTTCGCGTGTGATATTTATATTTGG
GCCCCTTTGGCCGGAACATGTGGGGTGTTGCTTCTCTCCCTTGTGATCACTCTGTATTGTAAGC
GCGGGAGAAAGAAGCTCCTGTACATCTTCAAGCAGCCTTTTATGCGACCTGTGCAAACCACTCA
GGAAGAAGATGGGTGTTCATGCCGCTTCCCCGAGGAGGAAGAAGGAGGGTGTGAACTGAGGGTG
AAATTTTCTAGAAGCGCCGATGCTCCCGCATATCAGCAGGGTCAGAATCAGCTCTACAATGAAT
TGAATCTCGGCAGGCGAGAAGAGTACGATGTTCTGGACAAGAGACGGGGCAGGGATCCCGAGAT
GGGGGGAAAGCCCCGGAGAAAAAATCCTCAGGAGGGGTTGTACAATGAGCTGCAGAAGGACAAG
ATGGCTGAAGCCTATAGCGAGATCGGAATGAAAGGCGAAAGACGCAGAGGCAAGGGGCATGACG
GTCTGTACCAGGGTCTCTCTACAGCCACCAAGGACACTTATGATGCGTTGCATATGCAAGCCTT
GCCACCCCGCTAA
exemplary GFP cargo sequence
SEQ ID NO: 177
ATGGTGAGCAAGGGCGAGGAGCTGTTCACCGGGGTGGTGCCCATCCTGGTCGAGCTGGACGGCG
ACGTAAACGGCCACAAGTTCAGCGTGTCCGGCGAGGGCGAGGGCGATGCCACCTACGGCAAGCT
GACCCTGAAGTTCATCTGCACCACCGGCAAGCTGCCCGTGCCCTGGCCCACCCTCGTGACCACC
CTGACCTACGGCGTGCAGTGCTTCAGCCGCTACCCCGACCACATGAAGCAGCACGACTTCTTCA
AGTCCGCCATGCCCGAAGGCTACGTCCAGGAGCGCACCATCTTCTTCAAGGACGACGGCAACTA
CAAGACCCGCGCCGAGGTGAAGTTCGAGGGCGACACCCTGGTGAACCGCATCGAGCTGAAGGGC
ATCGACTTCAAGGAGGACGGCAACATCCTGGGGCACAAGCTGGAGTACAACTACAACAGCCACA
ACGTCTATATCATGGCCGACAAGCAGAAGAACGGCATCAAGGTGAACTTCAAGATCCGCCACAA
CATCGAGGACGGCAGCGTGCAGCTCGCCGACCACTACCAGCAGAACACCCCCATCGGCGACGGC
CCCGTGCTGCTGCCCGACAACCACTACCTGAGCACCCAGTCCGCCCTGAGCAAAGACCCCAACG
AGAAGCGCGATCACATGGTCCTGCTGGAGTTCGTGACCGCCGCCGGGATCACTCTCGGCATGGA
CGAGCTGTACAAGTGA
exemplary CXCR1 cargo sequence
SEQ ID NO: 178
ATGTCAAATATTACAGATCCACAGATGTGGGATTTTGATGATCTAAATTTCACTGGCATGCCAC
CTGCAGATGAAGATTAGAGCCCCTGTATGCTAGAAACTGAGACACTCAACAAGTATGTTGTGAT
CATCGCCTATGCCCTAGTGTTCCTGCTGAGCCTGCTGGGAAACTCCCTGGTGATGCTGGTCATC
TTATACAGCAGGGTCGGCCGCTCCGTCACTGATGTCTACCTGCTGAACCTGGCCTTGGCCGACC
TACTCTTTGCCCTGACCTTGCCCATCTGGGCCGCCTCCAAGGTGAATGGCTGGATTTTTGGCAC
ATTCCTGTGCAAGGTGGTCTCACTCCTGAAGGAAGTCAACTTCTACAGTGGCATCCTGCTGTTG
GCCTGCATCAGTGTGGACCGTTACCTGGCCATTGTCCATGCCACACGCACACTGACCCAGAAGC
GTCACTTGGTCAAGTTTGTTTGTCTTGGCTGCTGGGGACTGTCTATGAATCTGTCCCTGCCCTT
CTTCCTTTTCCGCCAGGCTTACCATCCAAACAATTCCAGTCCAGTTTGCTATGAGGTCCTGGGA
AATGACACAGCAAAATGGCGGATGGTGTTGCGGATCCTGCCTCACACCTTTGGCTTCATCGTGC
CGCTGTTTGTCATGCTGTTCTGCTATGGATTCACCCTGCGTACACTGTTTAAGGCCCACATGGG
GCAGAAGCACCGAGCCATGAGGGTCATCTTTGCTGTCGTCCTCATCTTCCTGCTTTGCTGGCTG
CCCTACAACCTGGTCCTGCTGGCAGACACCCTCATGAGGACCCAGGTGATCCAGGAGAGCTGTG
AGCGCCGCAACAACATCGGCCGGGCCCTGGATGCCACTGAGATTCTGGGATTTCTCCATAGCTG
CCTCAACCCCATCATCTACGCCTTCATCGGCCAAAATTTTCGCCATGGATTCCTCAAGATCCTG
GCTATGCATGGCCTGGTCAGCAAGGAGTTCTTGGCACGTCATCGTGTTACCTCCTACACTTCTT
CGTCTGTCAATGTCTCTTCCAACCTCTGA
exemplary CXCR3B cargo sequence
SEQ ID NO: 179
ATGGAGTTGAGGAAGTACGGCCCTGGAAGACTGGCGGGGACAGTTATAGGAGGAGCTGCTCAGA
GTAAATCACAGACTAAATCAGACTCAATCACAAAAGAGTTCCTGCCAGGCCTTTAGACAGCCCC
TTCCTCCCCGTTCCCGCCCTCACAGGTGAGTGACCACCAAGTGCTAAATGACGCCGAGGTTGCC
GCCCTCCTGGAGAACTTCAGCTCTTCCTATGACTATGGAGAAAACGAGAGTGACTCGTGCTGTA
CCTCCCCGCCCTGCCCACAGGACTTCAGCCTGAACTTCGACCGGGCCTTCCTGCCAGCCCTCTA
CAGCCTCCTCTTTCTGCTGGGGCTGCTGGGCAACGGCGCGGTGGCAGCCGTGCTGCTGAGCCGG
CGGACAGCCCTGAGCAGCACCGACACCTTCCTGCTCCACCTAGCTGTAGCAGACACGCTGCTGG
TGCTGACACTGCCGCTCTGGGCAGTGGACGCTGCCGTCCAGTGGGTCTTTGGCTCTGGCCTCTG
CAAAGTGGCAGGTGCCCTCTTCAACATCAACTTCTACGCAGGAGCCCTCCTGCTGGCCTGCATC
AGCTTTGACCGCTACCTGAACATAGTTCATGCCACCCAGCTCTACCGCCGGGGGCCCCCGGCCC
GCGTGACCCTCACCTGCCTGGCTGTCTGGGGGCTCTGCCTGCTTTTCGCCCTCCCAGACTTCAT
CTTCCTGTCGGCCCACCACGACGAGCGCCTCAACGCCACCCACTGCCAATACAACTTCCCACAG
GTGGGCCGCACGGCTCTGCGGGTGCTGCAGCTGGTGGCTGGCTTTCTGCTGCCCCTGCTGGTCA
TGGCCTACTGCTATGCCCACATCCTGGCCGTGCTGCTGGTTTCCAGGGGCCAGCGGCGCCTGCG
GGCCATGCGGCTGGTGGTGGTGGTCGTGGTGGCCTTTGCCCTCTGCTGGACCCCCTATCACCTG
GTGGTGCTGGTGGACATCCTCATGGACCTGGGCGCTTTGGCCCGCAACTGTGGCCGAGAAAGCA
GGGTAGACGTGGCCAAGTCGGTCACCTCAGGCCTGGGCTACATGCACTGCTGCCTCAACCCGCT
GCTCTATGCCTTTGTAGGGGTCAAGTTCCGGGAGCGGATGTGGATGCTGCTCTTGCGCCTGGGC
TGCCCCAACCAGAGAGGGCTCCAGAGGCAGCCATCGTCTTCCCGCCGGGATTCATCCTGGTCTG
AGACCTCAGAGGCCTCCTACTCGGGCTTGTGA
exemplary CXCR3 A cargo sequence
SEQ ID NO: 180
ATGGTCCTTGAGGTGAGTGACCACCAAGTGCTAAATGACGCCGAGGTTGCCGCCCTCCTGGAGA
ACTTCAGCTCTTCCTATGACTATGGAGAAAACGAGAGTGACTCGTGCTGTACCTCCCCGCCCTG
CCCACAGGACTTCAGCCTGAACTTCGACCGGGCCTTCCTGCCAGCCCTCTACAGCCTCCTCTTT
CTGCTGGGGCTGCTGGGCAACGGCGCGGTGGCAGCCGTGCTGCTGAGCCGGCGGACAGCCCTGA
GCAGCACCGACACCTTCCTGCTCCACCTAGCTGTAGCAGACACGCTGCTGGTGCTGACACTGCC
GCTCTGGGCAGTGGACGCTGCCGTCCAGTGGGTCTTTGGCTCTGGCCTCTGCAAAGTGGCAGGT
GCCCTCTTCAACATCAACTTCTACGCAGGAGCCCTCCTGCTGGCCTGCATCAGCTTTGACCGCT
ACCTGAACATAGTTCATGCCACCCAGCTCTACCGCCGGGGGCCCCCGGCCCGCGTGACCCTCAC
CTGCCTGGCTGTCTGGGGGCTCTGCCTGCTTTTCGCCCTCCCAGACTTCATCTTCCTGTCGGCC
CACCACGACGAGCGCCTCAACGCCACCCACTGCCAATACAACTTCCCACAGGTGGGCCGCACGG
CTCTGCGGGTGCTGCAGCTGGTGGCTGGCTTTCTGCTGCCCCTGCTGGTCATGGCCTACTGCTA
TGCCCACATCCTGGCCGTGCTGCTGGTTTCCAGGGGCCAGCGGCGCCTGCGGGCCATGCGGCTG
GTGGTGGTGGTCGTGGTGGCCTTTGCCCTCTGCTGGACCCCCTATCACCTGGTGGTGCTGGTGG
ACATCCTCATGGACCTGGGCGCTTTGGCCCGCAACTGTGGCCGAGAAAGCAGGGTAGACGTGGC
CAAGTCGGTCACCTCAGGCCTGGGCTACATGCACTGCTGCCTCAACCCGCTGCTCTATGCCTTT
GTAGGGGTCAAGTTCCGGGAGCGGATGTGGATGCTGCTCTTGCGCCTGGGCTGCCCCAACCAGA
GAGGGCTCCAGAGGCAGCCATCGTCTTCCCGCCGGGATTCATCCTGGTCTGAGACCTCAGAGGC
CTCCTACTCGGGCTTGTGA
exemplary CCR5 cargo sequence
SEQ ID NO: 181
ATGGATTATCAAGTGTCAAGTCCAATCTATGAGATCAATTATTATACATCGGAGCCCTGCCAAA
AAATCAATGTGAAGCAAATCGCAGCCCGCCTCCTGCCTCCGCTCTACTCACTGGTGTTCATCTT
TGGTTTTGTGGGCAACATGCTGGTCATCCTCATCCTGATAAACTGCAAAAGGCTGAAGAGCATG
ACTGACATCTACCTGCTCAACCTGGCCATCTCTGACCTGTTTTTCCTTCTTACTGTCCCCTTCT
GGGCTCACTATGCTGCCGCCCAGTGGGACTTTGGAAATACAATGTGTCAACTCTTGACAGGGCT
CTATTTTATAGGCTTCTTCTCTGGAATCTTCTTCATCATCCTCCTGACAATCGATAGGTACCTG
GCTGTCGTCCATGCTGTGTTTGCTTTAAAAGCCAGGACGGTCACCTTTGGGGTGGTGACAAGTG
TGATCACTTGGGTGGTGGCTGTGTTTGCGTCTCTCCCAGGAATCATCTTTACCAGATCTCAAAA
AGAAGGTCTTCATTAGACCTGCAGCTCTCATTTTCCATACAGTCAGTATCAATTCTGGAAGAAT
TTCCAGACATTAAAGATAGTCATCTTGGGGCTGGTCCTGCCGCTGCTTGTCATGGTCATCTGCT
ACTCGGGAATCCTAAAAACTCTGCTTCGGTGTCGAAATGAGAAGAAGAGGCACAGGGCTGTGAG
GCTTATCTTCACCATCATGATTGTTTATTTTCTCTTCTGGGCTCCCTACAACATTGTCCTTCTC
CTGAACACCTTCCAGGAATTCTTTGGCCTGAATAATTGCAGTAGCTCTAACAGGTTGGACCAAG
CTATGCAGGTGACAGAGACTCTTGGGATGACGCACTGCTGCATCAACCCCATCATCTATGCCTT
TGTCGGGGAGAAGTTCAGAAACTACCTCTTAGTCTTCTTCCAAAAGCACATTGCCAAACGCTTC
TGCAAATGCTGTTCTATTTTCCAGCAAGAGGCTCCCGAGCGAGCAAGCTCAGTTTACACCCGAT
CCACTGGGGAGCAGGAAATATCTGTGGGCTTGTGA
exemplary CCR2 cargo sequence
SEQ ID NO: 182
ATGCTGTCCACATCTCGTTCTCGGTTTATCAGAAATACCAACGAGAGCGGTGAAGAAGTCACCA
CCTTTTTTGATTATGATTACGGTGCTCCCTGTCATAAATTTGACGTGAAGCAAATTGGGGCCCA
ACTCCTGCCTCCGCTCTACTCGCTGGTGTTCATCTTTGGTTTTGTGGGCAACATGCTGGTCGTC
CTCATCTTAATAAACTGCAAAAAGCTGAAGTGCTTGAGTGACATTTACCTGCTCAACCTGGCCA
TCTCTGATCTGCTTTTTCTTATTACTCTCCCATTGTGGGCTCACTCTGCTGCAAATGAGTGGGT
CTTTGGGAATGCAATGTGCAAATTATTCACAGGGCTGTATCACATCGGTTATTTTGGCGGAATC
TTCTTCATCATCCTCCTGACAATCGATAGATACCTGGCTATTGTCCATGCTGTGTTTGCTTTAA
AAGCCAGGACGGTCACCTTTGGGGTGGTGACAAGTGTGATCACCTGGTTGGTGGCTGTGTTTGC
TTCTGTCCCAGGAATCATCTTTACTAAATGCCAGAAAGAAGATTCTGTTTATGTCTGTGGCCCT
TATTTTCCACGAGGATGGAATAATTTCCACACAATAATGAGGAACATTTTGGGGCTGGTCCTGC
CGCTGCTCATCATGGTCATCTGCTACTCGGGAATCCTGAAAACCCTGCTTCGGTGTCGAAACGA
GAAGAAGAGGCATAGGGCAGTGAGAGTCATCTTCACCATCATGATTGTTTACTTTCTCTTCTGG
ACTCCCTATAATATTGTCATTCTCCTGAACACCTTCCAGGAATTCTTCGGCCTGAGTAACTGTG
AAAGCACCAGTCAACTGGACCAAGCCACGCAGGTGACAGAGACTCTTGGGATGACTCACTGCTG
CATCAATCCCATCATCTATGCCTTCGTTGGGGAGAAGTTCAGAAGCCTTTTTCACATAGCTCTT
GGCTGTAGGATTGCCCCACTCCAAAAACCAGTGTGTGGAGGTCCAGGAGTGAGACCAGGAAAGA
ATGTGAAAGTGACTACACAAGGACTCCTCGATGGTCGTGGAAAAGGAAAGTCAATTGGCAGAGC
CCCTGAAGCCAGTCTTCAGGACAAAGAAGGAGCCTAG

[0661] In some embodiments, a gene product of interest comprises or consists of an amino acid sequence of any one of SEQ ID NOs: 161, 164, or 183-200. In some embodiments, a gene product of interest comprises or consists of an amino acid sequence that is at least 85%, 90%, 95%, 98% or 99% identical to any one of SEQ ID NOs: 161, 164, or 183-200.

exemplary linker amino acid sequence
SEQ ID NO: 183
SGGGSGGGGSGGGGSGGGGSGGGSLQ
exemplary CD16 amino acid sequence
SEQ ID NO: 184
MWQLLLPTALLLLVSAGMRTEDLPKAVVFLEPQWYRVLEKDSVTLKCQGAYSPEDNSTQWFHNE
SLISSQASSYFIDAATVDDSGEYRCQTNLSTLSDPVQLEVHIGWLLLQAPRWVFKEEDPIHLRC
HSWKNTALHKVTYLQNGKGRKYFHHNSDFYIPKATLKDSGSYFCRGLVGSKNVSSETVNITITQ
GLAVSTISSFFPPGYQVSFCLVMVLLFAVDTGLYFSVKTNIRSSTRDWKDHKFKWRKDPQDK
exemplary CD47 amino acid sequence
SEQ ID NO: 185
MWPLVAALLLGSACCGSAQLLFNKTKSVEFTFCNDTVVIPCFVTNMEAQNTTEVYVKWKFKGRD
IYTFDGALNKSTVPTDFSSAKIEVSQLLKGDASLKMDKSDAVSHTGNYTCEVTELTREGETIIE
LKYRVVSWFSPNENILIVIFPIFAILLFWGQFGIKTLKYRSGGMDEKTIALLVAGLVITVIVIV
GAILFVPGEYSLKNATGLGLIVTSTGILILLHYYVFSTAIGLTSFVIAILVIQVIAYILAVVGL
SLCIAACIPMHGPLLISGLSILALAQLLGLVYMKFVASNQKTIQPPRKAVEEPLNAFKESKGMM
NDE
exemplary IL15 amino acid sequence
SEQ ID NO: 186
NWVNVISDLKKIEDLIQSMHIDATLYTESDVHPSCKVTAMKCFLLELQVISLESGDASIHDTVE
NLIILANNSLSSNGNVTESGCKECEELEEKNIKEFLQSFVHIVQMFINTS
exemplary IgE-IL15 amino acid sequence
SEQ ID NO: 187
MDWTWILFLVAAATRVHSNWVNVISDLKKIEDLIQSMHIDATLYTESDVHPSCKVTAMKCFLLE
LQVISLESGDASIHDTVENLIILANNSLSSNGNVTESGCKECEELEEKNIKEFLQSFVHIVQMF
INTS
exemplary IgE-IL15 pro-peptide amino acid sequence
SEQ ID NO: 188
MDWTWILFLVAAATRVHSGIHVFILGCFSAGLPKTEANWVNVISDLKKIEDLIQSMHIDATLYT
ESDVHPSCKVTAMKCFLLELQVISLESGDASIHDTVENLIILANNSLSSNGNVTESGCKECEEL
EEKNIKEFLQSFVHIVQMFINTS
exemplary IL15Rα amino acid sequence
SEQ ID NO: 189
ITCPPPMSVEHADIWVKSYSLYSRERYICNSGFKRKAGTSSLTECVLNKATNVAHWTTPSLKCI
RDPALVHQRPAPPSTVTTAGVTPQPESLSPSGKEPAASSPSSNNTAATTAAIVPGSQLMPSKSP
STGTTEISSHESSHGTPSQTTAKNWELTASASHQPPGVYPQGHSDTTVAISTSTVLLCGLSAVS
LLACYLKSRQTPPLASVEMEAMEALPVTWGTSSRDEDLENCSHHL
exemplary mbIL-15 amino acid sequence
SEQ ID NO: 190
[sequence omitted]
exemplary mbIL-15 amino acid sequence
SEQ ID NO: 191
MDWTWILFLVAAATRVHSGIHVFILGCFSAGLPKTEANWVNVISDLKKIEDLIQSMHIDATLYT
ESDVHPSCKVTAMKCFLLELQVISLESGDASIHDTVENLIILANNSLSSNGNVTESGCKECEEL
EEKNIKEFLQSFVHIVQMFINTSSGGGSGGGGSGGGGSGGGGSGGGSLQITCPPPMSVEHADIW
VKSYSLYSRERYICNSGFKRKAGTSSLTECVLNKATNVAHWTTPSLKCIRDPALVHQRPAPPST
VTTAGVTPQPESLSPSGKEPAASSPSSNNTAATTAAIVPGSQLMPSKSPSTGTTEISSHESSHG
TPSQTTAKNWELTASASHQPPGVYPQGHSDTTVAISTSTVLLCGLSAVSLLACYLKSRQTPPLA
SVEMEAMEALPVTWGTSSRDEDLENCSHHL
exemplary multi cistronic CD16, mbIL-15 amino acid sequence
SEQ ID NO: 192
MWQLLLPTALLLLVSAGMRTEDLPKAVVFLEPQWYRVLEKDSVTLKCQGAYSPEDNSTQWFHNE
SLISSQASSYFIDAATVDDSGEYRCQTNLSTLSDPVQLEVHIGWLLLQAPRWVFKEEDPIHLRC
HSWKNTALHKVTYLQNGKGRKYFHHNSDFYIPKATLKDSGSYFCRGLVGSKNVSSETVNITITQ
GLAVSTISSFFPPGYQVSFCLVMVLLFAVDTGLYFSVKTNIRSSTRDWKDHKFKWRKDPQDKGS
GATNFSLLKQAGDVEENPGPMDWTWILFLVAAATRVHSNWVNVISDLKKIEDLIQSMHIDATLY
TESDVHPSCKVTAMKCFLLELQVISLESGDASIHDTVENLIILANNSLSSNGNVTESGCKECEE
LEEKNIKEFLQSFVHIVQMFINTSSGGGSGGGGSGGGGSGGGGSGGGSLQITCPPPMSVEHADI
WVKSYSLYSRERYICNSGFKRKAGTSSLTECVLNKATNVAHWTTPSLKCIRDPALVHQRPAPPS
TVTTAGVTPQPESLSPSGKEPAASSPSSNNTAATTAAIVPGSQLMPSKSPSTGTTEISSHESSH
GTPSQTTAKNWELTASASHQPPGVYPQGHSDTTVAISTSTVLLCGLSAVSLLACYLKSRQTPPL
ASVEMEAMEALPVTWGTSSRDEDLENCSHHL
exemplary CD19 CAR amino acid sequence
SEQ ID NO: 193
MLLLVTSLLLCELPHPAFLLIPDIQMTQTTSSLSASLGDRVTISCRASQDISKYLNWYQQKPDG
TVKLLIYHTSRLHSGVPSRFSGSGSGTDYSLTISNLEQEDIATYFCQQGNTLPYTFGGGTKLEI
TGSTSGSGKPGSGEGSTKGEVKLQESGPGLVAPSQSLSVTCTVSGVSLPDYGVSWIRQPPRKGL
EWLGVIWGSETTYYNSALKSRLTIIKDNSKSQVFLKMNSLQTDDTAIYYCAKHYYYGGSYAMDY
WGQGTSVTVSSAAAIEVMYPPPYLDNEKSNGTIIHVKGKHLCPSPLFPGPSKPFWVLVVVGGVL
ACYSLLVTVAFIIFWVRSKRSRLLHSDYMNMTPRRPGPTRKHYQPYAPPRDFAAYRSRVKFSRS
ADAPAYQQGQNQLYNELNLGRREEYDVLDKRRGRDPEMGGKPRRKNPQEGLYNELQKDKMAEAY
SEIGMKGERRRGKGHDGLYQGLSTATKDTYDALHMQALPPR
exemplary EGFR CAR amino acid sequence
SEQ ID NO: 194
MALPVTALLLPLALLLHAARPMDEVQLVESGGGLVQPGGSLRLSCAASGFSFTNYGVHWVRQAP
GKGLEWVSVIWSGGNTDYNTSVKGRFTISRDNSKNTLYLQMNSLRAEDTAVYYCARALTYYDYE
FAYWGQGTLVTVSSGGGGSGGGGSGGGGSEIVLTQSPATLSLSPGERATLSCRASQSIGTNIHW
YQQKPGQAPRLLIYYASESISGIPARFSGSGSGTDFTLTISSLEPEDFAVYYCQQNNNWPTTFG
QGTKLEIKGSLEAAATTTPAPRPPTPAPTIASQPLSLRPEACRPAAGGAVHTRGLDFACDIYIW
APLAGTCGVLLLSLVITLYCKRGRKKLLYIFKQPFMRPVQTTQEEDGCSCRFPEEEEGGCELRV
KFSRSADAPAYQQGQNQLYNELNLGRREEYDVLDKRRGRDPEMGGKPRRKNPQEGLYNELQKDK
[sequence omitted]
exemplary GFP amino acid sequence
SEQ ID NO: 195
MVSKGEELFTGVVPILVELDGDVNGHKFSVSGEGEGDATYGKLTLKFICTTGKLPVPWPTLVTT
LTYGVQCFSRYPDHMKQHDFFKSAMPEGYVQERTIFFKDDGNYKTRAEVKFEGDTLVNRIELKG
IDFKEDGNILGHKLEYNYNSHNVYIMADKQKNGIKVNFKIRHNIEDGSVQLADHYQQNTPIGDG
PVLLPDNHYLSTQSALSKDPNEKRDHMVLLEFVTAAGITLGMDELYK
exemplary CXCR1 amino acid sequence
SEQ ID NO: 196
MSNITDPQMWDFDDLNFTGMPPADEDYSPCMLETETLNKYVVIIAYALVFLLSLLGNSLVMLVI
LYSRVGRSVTDVYLLNLALADLLFALTLPIWAASKVNGWIFGTFLCKVVSLLKEVNFYSGILLL
ACISVDRYLAIVHATRTLTQKRHLVKFVCLGCWGLSMNLSLPFFLFRQAYHPNNSSPVCYEVLG
NDTAKWRMVLRILPHTFGFIVPLFVMLFCYGFTLRTLFKAHMGQKHRAMRVIFAVVLIFLLCWL
PYNLVLLADTLMRTQVIQESCERRNNIGRALDATEILGFLHSCLNPIIYAFIGQNFRHGFLKIL
AMHGLVSKEFLARHRVTSYTSSSVNVSSNL
exemplary CXCR3B amino acid sequence
SEQ ID NO: 197
MELRKYGPGRLAGTVIGGAAQSKSQTKSDSITKEFLPGLYTAPSSPFPPSQVSDHQVLNDAEVA
ALLENFSSSYDYGENESDSCCTSPPCPQDFSLNFDRAFLPALYSLLFLLGLLGNGAVAAVLLSR
RTALSSTDTFLLHLAVADTLLVLTLPLWAVDAAVQWVFGSGLCKVAGALFNINFYAGALLLACI
SFDRYLNIVHATQLYRRGPPARVTLTCLAVWGLCLLFALPDFIFLSAHHDERLNATHCQYNFPQ
VGRTALRVLQLVAGFLLPLLVMAYCYAHILAVLLVSRGORRLRAMRLVVVVVVAFALCWTPYHL
VVLVDILMDLGALARNCGRESRVDVAKSVTSGLGYMHCCLNPLLYAEVGVKFRERMWMLLLRLG
CPNQRGLQRQPSSSRRDSSWSETSEASYSGL
exemplary CXCR3 A amino acid sequence
SEQ ID NO: 198
MVLEVSDHQVLNDAEVAALLENFSSSYDYGENESDSCCTSPPCPQDFSLNFDRAFLPALYSLLF
LLGLLGNGAVAAVLLSRRTALSSTDTFLLHLAVADTLLVLTLPLWAVDAAVQWVFGSGLCKVAG
ALFNINFYAGALLLACISFDRYLNIVHATQLYRRGPPARVTLTCLAVWGLCLLFALPDFIFLSA
HHDERLNATHCQYNFPQVGRTALRVLQLVAGFLLPLLVMAYCYAHILAVLLVSRGQRRLRAMRL
VVVVVVAFALCWTPYHLVVLVDILMDLGALARNCGRESRVDVAKSVTSGLGYMHCCLNPLLYAF
VGVKFRERMWMLLLRLGCPNQRGLQRQPSSSRRDSSWSETSEASYSGL
exemplary CCR5 amino acid sequence
SEQ ID NO: 199
[sequence omitted]
exemplary CCR2 cargo sequence
SEQ ID NO: 200
MLSTSRSRFIRNTNESGEEVTTFFDYDYGAPCHKFDVKQIGAQLLPPLYSLVFIFGFVGNMLVV
LILINCKKLKCLTDIYLLNLAISDLLFLITLPLWAHSAANEWVFGNAMCKLFTGLYHIGYFGGI
FFIILLTIDRYLAIVHAVFALKARTVTFGVVTSVITWLVAVFASVPGIIFTKCQKEDSVYVCGP
YFPRGWNNFHTIMRNILGLVLPLLIMVICYSGILKTLLRCRNEKKRHRAVRVIFTIMIVYFLFW
TPYNIVILLNTFQEFFGLSNCESTSQLDQATQVTETLGMTHCCINPIIYAFVGEKFRSLFHIAL
GCRIAPLQKPVCGGPGVRPGKNVKVTTQGLLDGRGKGKSIGRAPEASLQDKEGA

[0662] AAV Capsids

[0663] In some embodiments, the present disclosure provides one or more polynucleotide constructs (e.g., knock-in cassettes) packaged into an AAV capsid. In some embodiments, an AAV capsid is from or derived from an AAV capsid of an AAV2, 3, 4, 5, 6, 7, 8, 9, or 10 serotype, or one or more hybrids thereof. In some embodiments, an AAV capsid is from an AAV ancestral serotype. In some embodiments, an AAV capsid is an ancestral (Anc) AAV capsid. An Anc capsid is created from a construct sequence that is constructed using evolutionary probabilities and evolutionary modeling to determine a probable ancestral sequence. In some embodiments, an AAV capsid has been modified in a manner known in the art (see e.g., BUning and Srivastava, Capsid modifications for targeting and improving the efficacy of AAV vectors, Mol Ther Methods Clin Dev. 2019)

[0664] In some embodiments, as provided herein, any combination of AAV capsids and AAV constructs (e.g., comprising AAV ITRs) may be used in recombinant AAV (rAAV) particles of the present disclosure. In some embodiments, an AAV ITR is from or derived from an AAV ITR of AAV2, 3, 4, 5, 6, 7, 8, 9, or 10. For example, wild-type or variant AA6 ITRs and AAV6 capsid, wild-type or variant AAV2 ITRs and AAV6 capsid, etc. In some embodiments of the present disclosure, an AAV particle is wholly comprised of AAV6 components (e.g., capsid and ITRs are AAV6 serotype). In some embodiments, an AAV particle is an AAV6/2, AAV6/8 or AAV6/9 particle (e.g., an AAV2, AAV8 or AAV9 capsid with an AAV construct having AAV6 ITRs).

[0665] Exemplary AAV Constructs

[0666] In some embodiments, a donor template is included within an AAV construct. In some embodiments, an AAV construct sequence comprises or consists of the sequence of any one of SEQ ID NO: 201-204. In some embodiments, an exemplary AAV construct is represented by SEQ ID NO: 201. In some embodiments, an exemplary AAV construct is represented by SEQ ID NO: 202. In some embodiments, an exemplary AAV construct is represented by SEQ ID NO: 203. In some embodiments, an exemplary AAV construct is represented by SEQ ID NO: 204. In some embodiments, an exemplary AAV construct is at least 80%, 85%, 90%, 95%, 98%, or 99% identical to a sequence represented by SEQ ID NO: 201-204.

exemplary AAV construct for donor template insertion
at GAPDH locus
SEQ ID NO: 201
CCTGCAGGCAGCTGCGCGCTCGCTCGCTCACTGAGGCCGCCCGGGCAAAGCCCGGGCGTCGGGC
GACCTTTGGTCGCCCGGCCTCAGTGAGCGAGCGAGCGCGCAGAGAGGGAGTGGCCAACTCCATC
ACTAGGGGTTCCTGTCGACGAAGACTGTGGATGGCCCCTCCGGGAAACTGTGGCGTGATGGCCG
CGGGGCTCTCCAGAACATCATCCCTGCCTCTACTGGCGCTGCCAAGGCTGTGGGCAAGGTCATC
CCTGAGCTGAACGGGAAGCTCACTGGCATGGCCTTCCGTGTCCCCACTGCCAACGTGTCAGTGG
TGGACCTGACCTGCCGTCTAGAAAAACCTGCCAAATATGATGACATCAAGAAGGTGGTGAAGCA
GGCGTCGGAGGGCCCCCTCAAGGGCATCCTGGGCTACACTGAGCACCAGGTGGTCTCCTCTGAC
TTCAACAGCGACACCCACTCCTCCACCTTTGACGCTGGGGCTGGCATTGCCCTCAACGACCACT
TTGTCAAGCTCATTTCCTGGTATGTGGCTGGGGCCAGAGACTGGCTCTTAAAAAGTGCAGGGTC
TGGCGCCCTCTGGTGGCTGGCTCAGAAAAAGGGCCCTGACAACTCTTTACATCTTCTAGGTATG
ACAACGAGTTCGGATATAGCAATAGAGTGGTCGATCTGATGGCTCATATGGCTAGCAAAGAGGG
AAGCGGAGCTACTAACTTCAGCCTGCTGAAGCAGGCTGGAGACGTGGAGGAGAACCCTGGACCT
ATGTGGCAACTGCTGCTGCCTACAGCTCTGCTGCTTCTGGTGTCTGCCGGCATGAGAACCGAGG
ATCTGCCTAAGGCCGTGGTGTTCCTGGAACCTCAGTGGTACAGAGTGCTGGAAAAGGACAGCGT
GACCCTGAAGTGCCAGGGCGCCTATTCTCCCGAGGACAATAGCACCCAGTGGTTCCACAACGAG
AGCCTGATCAGCAGCCAGGCCAGCAGCTACTTTATCGATGCCGCCACCGTGGACGACAGCGGCG
AGTACAGATGCCAGACCAATCTGAGCACCCTGAGCGACCCTGTGCAGCTGGAAGTGCACATTGG
ATGGTTGCTGCTGCAAGCCCCTAGATGGGTGTTCAAAGAAGAGGACCCCATCCACCTGAGATGC
CACTCTTGGAAGAACACAGCCCTGCACAAAGTGACCTACCTGCAGAACGGCAAGGGCAGAAAGT
ACTTCCACCACAACAGCGACTTCTACATCCCCAAGGCCACACTGAAGGACTCCGGCTCCTACTT
CTGCAGAGGCCTGGTCGGCAGCAAGAACGTGTCCAGCGAGACAGTGAACATCACCATCACACAG
GGCCTCGCCGTGTCTACCATCAGCAGCTTTTTCCCACCTGGCTATCAGGTGTCCTTCTGCCTGG
TCATGGTGCTGCTGTTCGCCGTGGATACCGGCCTGTACTTCAGCGTCAAGACCAACATCCGGTC
CAGCACCAGAGACTGGAAGGACCACAAGTTCAAGTGGCGGAAGGACCCTCAGGACAAGTAAGCG
GCCGCGTCGAGTCTAGAGGGCCCGTTTAAACCCGCTGATCAGCCTCGACTGTGCCTTCTAGTTG
CCAGCCATCTGTTGTTTGCCCCTCCCCCGTGCCTTCCTTGACCCTGGAAGGTGCCACTCCCACT
GTCCTTTCCTAATAAAATGAGGAAATTGCATCGCATTGTCTGAGTAGGTGTCATTCTATTCTGG
GGGGTGGGGTGGGGCAGGACAGCAAGGGGGAGGATTGGGAAGACAATAGCAGGCATGCTGGGGA
TGCGGTGGGCTCTATGGATTTGGCTACAGCAACAGGGTGGTGGACCTCATGGCCCACATGGCCT
CCAAGGAGTAAGACCCCTGGACCACCAGCCCCAGCAAGAGCACAAGAGGAAGAGAGAGACCCTC
ACTGCTGGGGAGTCCCTGCCACACTCAGTCCCCCACCACACTGAATCTCCCCTCCTCACAGTTG
CCATGTAGACCCCTTGAAGAGGGGAGGGGCCTAGGGAGCCGCACCTTGTCATGTACCATCAATA
AAGTACCCTGTGCTCAACCAGTTACTTGTCCTGTCTTATTCTAGGGTCTGGGGCAGAGGGGAGG
GAAGCTGGGCTTGTGTCAAGGTGAGACATTCTTGCTGGGGAGGGACCTGGTATGTTCTCCTCAG
ACTGAGGGTAGGGCCTCCAAACAGCCTTGCTTGCTTCGAGAACCATTTGCTTCCCGCTCAGACG
TCTTGAGTGCTACAGGAAGCTGGCACCACTACTTCAGAGAACAAGGCCTTTTCCTCTCCTCGCT
CCAGTAGATCTAGGAACCCCTAGTGATGGAGTTGGCCACTCCCTCTCTGCGCGCTCGCTCGCTC
ACTGAGGCCGGGCGACCAAAGGTCGCCCGACGCCCGGGCTTTGCCCGGGCGGCCTCAGTGAGCG
AGCGAGCGCGCAGCTGCCTGCAGG
exemplary AAV construct for donor template insertion
at GAPDH locus
SEQ ID NO: 202
CCTGCAGGCAGCTGCGCGCTCGCTCGCTCACTGAGGCCGCCCGGGCAAAGCCCGGGCGTCGGGC
GACCTTTGGTCGCCCGGCCTCAGTGAGCGAGCGAGCGCGCAGAGAGGGAGTGGCCAACTCCATC
ACTAGGGGTTCCTGTCGACGAAGACTGTGGATGGCCCCTCCGGGAAACTGTGGCGTGATGGCCG
CGGGGCTCTCCAGAACATCATCCCTGCCTCTACTGGCGCTGCCAAGGCTGTGGGCAAGGTCATC
CCTGAGCTGAACGGGAAGCTCACTGGCATGGCCTTCCGTGTCCCCACTGCCAACGTGTCAGTGG
TGGACCTGACCTGCCGTCTAGAAAAACCTGCCAAATATGATGACATCAAGAAGGTGGTGAAGCA
GGCGTCGGAGGGCCCCCTCAAGGGCATCCTGGGCTACACTGAGCACCAGGTGGTCTCCTCTGAC
TTCAACAGCGACACCCACTCCTCCACCTTTGACGCTGGGGCTGGCATTGCCCTCAACGACCACT
TTGTCAAGCTCATTTCCTGGTATGTGGCTGGGGCCAGAGACTGGCTCTTAAAAAGTGCAGGGTC
TGGCGCCCTCTGGTGGCTGGCTCAGAAAAAGGGCCCTGACAACTCTTTACATCTTCTAGGTATG
ACAACGAGTTCGGATATAGCAATAGAGTGGTCGATCTGATGGCTCATATGGCTAGCAAAGAGGG
AAGCGGAGCTACTAACTTCAGCCTGCTGAAGCAGGCTGGAGACGTGGAGGAGAACCCTGGACCT
ATGGTGAGCAAGGGCGAGGAGCTGTTCACCGGGGTGGTGCCCATCCTGGTCGAGCTGGACGGCG
ACGTAAACGGCCACAAGTTCAGCGTGTCCGGCGAGGGCGAGGGCGATGCCACCTACGGCAAGCT
GACCCTGAAGTTCATCTGCACCACCGGCAAGCTGCCCGTGCCCTGGCCCACCCTCGTGACCACC
CTGACCTACGGCGTGCAGTGCTTCAGCCGCTACCCCGACCACATGAAGCAGCACGACTTCTTCA
AGTCCGCCATGCCCGAAGGCTACGTCCAGGAGCGCACCATCTTCTTCAAGGACGACGGCAACTA
CAAGACCCGCGCCGAGGTGAAGTTCGAGGGCGACACCCTGGTGAACCGCATCGAGCTGAAGGGC
ATCGACTTCAAGGAGGACGGCAACATCCTGGGGCACAAGCTGGAGTACAACTACAACAGCCACA
ACGTCTATATCATGGCCGACAAGCAGAAGAACGGCATCAAGGTGAACTTCAAGATCCGCCACAA
CATCGAGGACGGCAGCGTGCAGCTCGCCGACCACTACCAGCAGAACACCCCCATCGGCGACGGC
CCCGTGCTGCTGCCCGACAACCACTACCTGAGCACCCAGTCCGCCCTGAGCAAAGACCCCAACG
AGAAGCGCGATCACATGGTCCTGCTGGAGTTCGTGACCGCCGCCGGGATCACTCTCGGCATGGA
CGAGCTGTACAAGTGAGCGGCCGCGTCGAGTCTAGAGGGCCCGTTTAAACCCGCTGATCAGCCT
CGACTGTGCCTTCTAGTTGCCAGCCATCTGTTGTTTGCCCCTCCCCCGTGCCTTCCTTGACCCT
GGAAGGTGCCACTCCCACTGTCCTTTCCTAATAAAATGAGGAAATTGCATCGCATTGTCTGAGT
AGGTGTCATTCTATTCTGGGGGGTGGGGTGGGGCAGGACAGCAAGGGGGAGGATTGGGAAGACA
ATAGCAGGCATGCTGGGGATGCGGTGGGCTCTATGGATTTGGCTACAGCAACAGGGTGGTGGAC
CTCATGGCCCACATGGCCTCCAAGGAGTAAGACCCCTGGACCACCAGCCCCAGCAAGAGCACAA
GAGGAAGAGAGAGACCCTCACTGCTGGGGAGTCCCTGCCACACTCAGTCCCCCACCACACTGAA
TCTCCCCTCCTCACAGTTGCCATGTAGACCCCTTGAAGAGGGGAGGGGCCTAGGGAGCCGCACC
TTGTCATGTACCATCAATAAAGTACCCTGTGCTCAACCAGTTACTTGTCCTGTCTTATTCTAGG
GTCTGGGGCAGAGGGGAGGGAAGCTGGGCTTGTGTCAAGGTGAGACATTCTTGCTGGGGAGGGA
CCTGGTATGTTCTCCTCAGACTGAGGGTAGGGCCTCCAAACAGCCTTGCTTGCTTCGAGAACCA
TTTGCTTCCCGCTCAGACGTCTTGAGTGCTACAGGAAGCTGGCACCACTACTTCAGAGAACAAG
GCCTTTTCCTCTCCTCGCTCCAGTAGATCTAGGAACCCCTAGTGATGGAGTTGGCCACTCCCTC
TCTGCGCGCTCGCTCGCTCACTGAGGCCGGGCGACCAAAGGTCGCCCGACGCCCGGGCTTTGCC
CGGGCGGCCTCAGTGAGCGAGCGAGCGCGCAGCTGCCTGCAGG
exemplary AAV construct for donor template insertion
at GAPDH locus
SEQ ID NO: 203
CCTGCAGGCAGCTGCGCGCTCGCTCGCTCACTGAGGCCGCCCGGGCAAAGCCCGGGCGTCGGGC
GACCTTTGGTCGCCCGGCCTCAGTGAGCGAGCGAGCGCGCAGAGAGGGAGTGGCCAACTCCATC
ACTAGGGGTTCCTGTCGACGAAGACTGTGGATGGCCCCTCCGGGAAACTGTGGCGTGATGGCCG
CGGGGCTCTCCAGAACATCATCCCTGCCTCTACTGGCGCTGCCAAGGCTGTGGGCAAGGTCATC
CCTGAGCTGAACGGGAAGCTCACTGGCATGGCCTTCCGTGTCCCCACTGCCAACGTGTCAGTGG
TGGACCTGACCTGCCGTCTAGAAAAACCTGCCAAATATGATGACATCAAGAAGGTGGTGAAGCA
GGCGTCGGAGGGCCCCCTCAAGGGCATCCTGGGCTACACTGAGCACCAGGTGGTCTCCTCTGAC
TTCAACAGCGACACCCACTCCTCCACCTTTGACGCTGGGGCTGGCATTGCCCTCAACGACCACT
TTGTCAAGCTCATTTCCTGGTATGTGGCTGGGGCCAGAGACTGGCTCTTAAAAAGTGCAGGGTC
TGGCGCCCTCTGGTGGCTGGCTCAGAAAAAGGGCCCTGACAACTCTTTACATCTTCTAGGTATG
ACAACGAGTTCGGATATAGCAATAGAGTGGTCGATCTGATGGCTCATATGGCTAGCAAAGAGGG
AAGCGGAGCTACTAACTTCAGCCTGCTGAAGCAGGCTGGAGACGTGGAGGAGAACCCTGGACCT
ATGCTTCTCCTGGTGACAAGCCTTCTGCTCTGTGAGTTACCACACCCAGCATTCCTCCTGATCC
CAGACATCCAGATGACACAGACTAGATCCTCCCTGTCTGCCTCTCTGGGAGACAGAGTCACCAT
CAGTTGCAGGGCAAGTCAGGACATTAGTAAATATTTAAATTGGTATCAGCAGAAACCAGATGGA
ACTGTTAAACTCCTGATCTACCATACATCAAGATTAGACTCAGGAGTCCCATCAAGGTTCAGTG
GCAGTGGGTCTGGAACAGATTATTCTCTCACCATTAGCAACCTGGAGCAAGAAGATATTGCCAC
TTACTTTTGCCAACAGGGTAATACGCTTCCGTACACGTTCGGAGGGGGGACTAAGTTGGAAATA
ACAGGCTCCACCTCTGGATCCGGCAAGCCCGGATCTGGCGAGGGATCCACCAAGGGCGAGGTGA
AACTGCAGGAGTCAGGACCTGGCCTGGTGGCGCCCTCACAGAGCCTGTCCGTCACATGCACTGT
CTCAGGGGTCTCATTACCCGACTATGGTGTAAGCTGGATTCGCCAGCCTCCACGAAAGGGTCTG
GAGTGGCTGGGAGTAATATGGGGTAGTGAAACCACATACTATAATTCAGCTCTCAAATCCAGAC
TGACCATCATCAAGGACAACTCCAAGAGCCAAGTTTTCTTAAAAATGAACAGTCTGCAAACTGA
TGACACAGCCATTTACTACTGTGCCAAACATTATTACTACGGTGGTAGCTATGCTATGGACTAC
TGGGGTCAAGGAACCTCAGTCACCGTCTCCTCAGCGGCCGCAATTGAAGTTATGTATCCTCCTC
CTTACCTAGACAATGAGAAGAGCAATGGAACCATTATCCATGTGAAAGGGAAACACCTTTGTCC
AAGTCCCCTATTTCCCGGACCTTCTAAGCCCTTTTGGGTGCTGGTGGTGGTTGGGGGAGTCCTG
GCTTGCTATAGCTTGCTAGTAACAGTGGCCTTTATTATTTTCTGGGTGAGGAGTAAGAGGAGCA
GGCTCCTGCACAGTGACTACATGAACATGACTCCCCGCCGCCCCGGGCCCACCCGCAAGCATTA
CCAGCCCTATGCCCCACCACGCGACTTCGCAGCCTATCGCTCCAGAGTGAAGTTCAGCAGGAGC
GCAGACGCCCCCGCGTACCAGCAGGGCCAGAACCAGCTCTATAACGAGCTCAATCTAGGACGAA
GAGAGGAGTACGATGTTTTGGACAAGAGACGTGGCCGGGACCCTGAGATGGGGGGAAAGCCGAG
AAGGAAGAACCCTCAGGAAGGCCTGTACAATGAACTGCAGAAAGATAAGATGGCGGAGGCCTAC
AGTGAGATTGGGATGAAAGGCGAGCGCCGGAGGGGCAAGGGGCACGATGGCCTTTACCAGGGTC
TCAGTACAGCCACCAAGGACACCTACGACGCCCTTCACATGCAGGCCCTGCCCCCTCGCTAAAG
CGGCCGCGTCGAGTCTAGAGGGCCCGTTTAAACCCGCTGATCAGCCTCGACTGTGCCTTCTAGT
TGCCAGCCATCTGTTGTTTGCCCCTCCCCCGTGCCTTCCTTGACCCTGGAAGGTGCCACTCCCA
CTGTCCTTTCCTAATAAAATGAGGAAATTGCATCGCATTGTCTGAGTAGGTGTCATTCTATTCT
GGGGGGTGGGGTGGGGCAGGACAGCAAGGGGGAGGATTGGGAAGACAATAGCAGGCATGCTGGG
GATGCGGTGGGCTCTATGGATTTGGCTACAGCAACAGGGTGGTGGACCTCATGGCCCACATGGC
CTCCAAGGAGTAAGACCCCTGGACCACCAGCCCCAGCAAGAGCACAAGAGGAAGAGAGAGACCC
TCACTGCTGGGGAGTCCCTGCCACACTCAGTCCCCCACCACACTGAATCTCCCCTCCTCACAGT
TGCCATGTAGACCCCTTGAAGAGGGGAGGGGCCTAGGGAGCCGCACCTTGTCATGTACCATCAA
TAAAGTACCCTGTGCTCAACCAGTTACTTGTCCTGTCTTATTCTAGGGTCTGGGGCAGAGGGGA
GGGAAGCTGGGCTTGTGTCAAGGTGAGACATTCTTGCTGGGGAGGGACCTGGTATGTTCTCCTC
AGACTGAGGGTAGGGCCTCCAAACAGCCTTGCTTGCTTCGAGAACCATTTGCTTCCCGCTCAGA
CGTCTTGAGTGCTACAGGAAGCTGGCACCACTACTTCAGAGAACAAGGCCTTTTCCTCTCCTCG
CTCCAGTAGATCTAGGAACCCCTAGTGATGGAGTTGGCCACTCCCTCTCTGCGCGCTCGCTCGC
TCACTGAGGCCGGGCGACCAAAGGTCGCCCGACGCCCGGGCTTTGCCCGGGCGGCCTCAGTGAG
CGAGCGAGCGCGCAGCTGCCTGCAGG
exemplary AAV construct for donor template insertion
at GAPDH locus
SEQ ID NO: 204
CCTGCAGGCAGCTGCGCGCTCGCTCGCTCACTGAGGCCGCCCGGGCAAAGCCCGGGCGTCGGGC
GACCTTTGGTCGCCCGGCCTCAGTGAGCGAGCGAGCGCGCAGAGAGGGAGTGGCCAACTCCATC
ACTAGGGGTTCCTGTCGACGAAGACTGTGGATGGCCCCTCCGGGAAACTGTGGCGTGATGGCCG
CGGGGCTCTCCAGAACATCATCCCTGCCTCTACTGGCGCTGCCAAGGCTGTGGGCAAGGTCATC
CCTGAGCTGAACGGGAAGCTCACTGGCATGGCCTTCCGTGTCCCCACTGCCAACGTGTCAGTGG
TGGACCTGACCTGCCGTCTAGAAAAACCTGCCAAATATGATGACATCAAGAAGGTGGTGAAGCA
GGCGTCGGAGGGCCCCCTCAAGGGCATCCTGGGCTACACTGAGCACCAGGTGGTCTCCTCTGAC
TTCAACAGCGACACCCACTCCTCCACCTTTGACGCTGGGGCTGGCATTGCCCTCAACGACCACT
TTGTCAAGCTCATTTCCTGGTATGTGGCTGGGGCCAGAGACTGGCTCTTAAAAAGTGCAGGGTC
TGGCGCCCTCTGGTGGCTGGCTCAGAAAAAGGGCCCTGACAACTCTTTACATCTTCTAGGTATG
ACAACGAGTTCGGATATAGCAATAGAGTGGTCGATCTGATGGCTCATATGGCTAGCAAAGAGGG
AAGCGGAGCTACTAACTTCAGCCTGCTGAAGCAGGCTGGAGACGTGGAGGAGAACCCTGGACCT
ATGGCACTCCCCGTCACCGCCCTTCTCTTGCCCCTCGCCCTGCTGCTGCATGCTGCCAGGCCCA
TGGACGAAGTGCAGCTCGTGGAGTCCGGTGGAGGACTCGTCCAACCGGGCGGATCCCTTCGCTT
GTCCTGCGCCGCATCAGGCTTCAGCTTCACCAACTATGGCGTCCACTGGGTCAGACAGGCCCCC
GGAAAGGGACTGGAATGGGTGTCCGTGATCTGGAGCGGCGGGAACACCGACTACAACACCTCCG
TGAAGGGCCGGTTCACTATTAGCCGCGACAACTCCAAGAACACTCTGTACCTCCAAATGAACTC
CCTGAGGGCCGAAGATACTGCTGTGTACTATTGCGCGAGAGCCCTGACCTACTACGACTACGAG
TTCGCGTACTGGGGCCAGGGGACTCTCGTGACCGTGTCCAGCGGTGGTGGAGGTTCCGGAGGCG
GAGGTTCTGGTGGCGGGGGATCAGAAATCGTGCTGACTCAGTCCCCTGCGACCTTGTCCCTGAG
CCCTGGAGAACGGGCCACCCTGAGCTGTAGAGCCAGCCAGAGCATCGGGACAAATATTCACTGG
TACCAGCAGAAACCCGGACAAGCACCACGGCTGCTGATCTACTACGCCTCCGAGTCGATTTCCG
GAATCCCGGCTCGCTTTTCGGGGTCTGGATCGGGAACGGACTTCACTCTGACCATCTCGTCGCT
GGAACCCGAGGATTTCGCCGTGTACTACTGCCAACAGAACAACAATTGGCCGACCACGTTCGGC
CAGGGCACCAAGCTCGAGATTAAGGGATCACTGGAAGCGGCCGCAACCACAACACCTGCTCCAA
GGCCCCCCACACCCGCTCCAACTATAGCCAGCCAACCATTGAGCCTCAGACCTGAAGCTTGCAG
GCCCGCAGCAGGAGGCGCCGTCCATACGCGAGGCCTGGACTTCGCGTGTGATATTTATATTTGG
GCCCCTTTGGCCGGAACATGTGGGGTGTTGCTTCTCTCCCTTGTGATCACTCTGTATTGTAAGC
GCGGGAGAAAGAAGCTCCTGTACATCTTCAAGCAGCCTTTTATGCGACCTGTGCAAACCACTCA
GGAAGAAGATGGGTGTTCATGCCGCTTCCCCGAGGAGGAAGAAGGAGGGTGTGAACTGAGGGTG
AAATTTTCTAGAAGCGCCGATGCTCCCGCATATCAGCAGGGTCAGAATCAGCTCTACAATGAAT
TGAATCTCGGCAGGCGAGAAGAGTACGATGTTCTGGACAAGAGACGGGGCAGGGATCCCGAGAT
GGGGGGAAAGCCCCGGAGAAAAAATCCTCAGGAGGGGTTGTACAATGAGCTGCAGAAGGACAAG
ATGGCTGAAGCCTATAGCGAGATCGGAATGAAAGGCGAAAGACGCAGAGGCAAGGGGCATGACG
GTCTGTACCAGGGTCTCTCTACAGCCACCAAGGACACTTATGATGCGTTGCATATGCAAGCCTT
GCCACCCCGCTAAAGCGGCCGCGTCGAGTCTAGAGGGCCCGTTTAAACCCGCTGATCAGCCTCG
ACTGTGCCTTCTAGTTGCCAGCCATCTGTTGTTTGCCCCTCCCCCGTGCCTTCCTTGACCCTGG
AAGGTGCCACTCCCACTGTCCTTTCCTAATAAAATGAGGAAATTGCATCGCATTGTCTGAGTAG
GTGTCATTCTATTCTGGGGGGTGGGGTGGGGCAGGACAGCAAGGGGGAGGATTGGGAAGACAAT
AGCAGGCATGCTGGGGATGCGGTGGGCTCTATGGATTTGGCTACAGCAACAGGGTGGTGGACCT
CATGGCCCACATGGCCTCCAAGGAGTAAGACCCCTGGACCACCAGCCCCAGCAAGAGCACAAGA
GGAAGAGAGAGACCCTCACTGCTGGGGAGTCCCTGCCACACTCAGTCCCCCACCACACTGAATC
TCCCCTCCTCACAGTTGCCATGTAGACCCCTTGAAGAGGGGAGGGGCCTAGGGAGCCGCACCTT
GTCATGTACCATCAATAAAGTACCCTGTGCTCAACCAGTTACTTGTCCTGTCTTATTCTAGGGT
CTGGGGCAGAGGGGAGGGAAGCTGGGCTTGTGTCAAGGTGAGACATTCTTGCTGGGGAGGGACC
TGGTATGTTCTCCTCAGACTGAGGGTAGGGCCTCCAAACAGCCTTGCTTGCTTCGAGAACCATT
TGCTTCCCGCTCAGACGTCTTGAGTGCTACAGGAAGCTGGCACCACTACTTCAGAGAACAAGGC
CTTTTCCTCTCCTCGCTCCAGTAGATCTAGGAACCCCTAGTGATGGAGTTGGCCACTCCCTCTC
TGCGCGCTCGCTCGCTCACTGAGGCCGGGCGACCAAAGGTCGCCCGACGCCCGGGCTTTGCCCG
GGCGGCCTCAGTGAGCGAGCGAGCGCGCAGCTGCCTGCAGG

[0667] Exemplary Donor Template Sequences

[0668] In some embodiments, a donor template comprises in 5′ to 3′ order, a target sequence 5′ homology arm (which optionally comprises an optimized sequence that is not a wild type sequence), a second regulatory element that enables expression of a cargo sequence as a separate translational product (e.g., an IRES sequence and/or a 2A element), a cargo sequence (e.g., a gene product of interest), optionally a second regulatory element that enables expression of a cargo sequence as a separate translational product (e.g., an IRES sequence and/or a 2A element), optionally a second cargo sequence (e.g., a gene product of interest), optionally a 3′ UTR, a poly adenylation signal (e.g., a BGHpA signal), and a target sequence 3′ homology arm (which optionally comprises an optimized sequence that is not a wild type sequence).

[0669] In some embodiments, a donor template comprises or consists of the sequence of any one of SEQ ID NOs: 38-57 and 205-218. In some embodiments, a donor template comprises or consists of a sequence that is at least 85%, 90%, 95%, 98% or 99% identical to any one of SEQ ID NOs: 38-57 and 205-218.

exemplary donor template for insertion at GAPDH locus
SEQ ID NO: 38
GAAGACTGTGGATGGCCCCTCCGGGAAACTGTGGCGTGATGGCCGCGGGGCTCTCCAGAACATC
ATCCCTGCCTCTACTGGCGCTGCCAAGGCTGTGGGCAAGGTCATCCCTGAGCTGAACGGGAAGC
TCACTGGCATGGCCTTCCGTGTCCCCACTGCCAACGTGTCAGTGGTGGACCTGACCTGCCGTCT
AGAAAAACCTGCCAAATATGATGACATCAAGAAGGTGGTGAAGCAGGCGTCGGAGGGCCCCCTC
AAGGGCATCCTGGGCTACACTGAGCACCAGGTGGTCTCCTCTGACTTCAACAGCGACACCCACT
CCTCCACCTTTGACGCTGGGGCTGGCATTGCCCTCAACGACCACTTTGTCAAGCTCATTTCCTG
GTATGTGGCTGGGGCCAGAGACTGGCTCTTAAAAAGTGCAGGGTCTGGCGCCCTCTGGTGGCTG
GCTCAGAAAAAGGGCCCTGACAACTCTTTACATCTTCTAGGTATGACAACGAGTTCGGATATAG
CAATAGAGTGGTCGATCTGATGGCTCATATGGCTAGCAAAGAGGAGGGCAGAGGAAGTCTTCTA
ACATGCGGTGACGTGGAGGAGAATCCTGGCCCGATGGTGAGCAAGGGCGAGGAGCTGTTCACCG
GGGTGGTGCCCATCCTGGTCGAGCTGGACGGCGACGTAAACGGCCACAAGTTCAGCGTGTCCGG
CGAGGGCGAGGGCGATGCCACCTACGGCAAGCTGACCCTGAAGTTCATCTGCACCACCGGCAAG
CTGCCCGTGCCCTGGCCCACCCTCGTGACCACCCTGACCTACGGCGTGCAGTGCTTCAGCCGCT
ACCCCGACCACATGAAGCAGCACGACTTCTTCAAGTCCGCCATGCCCGAAGGCTACGTCCAGGA
GCGCACCATCTTCTTCAAGGACGACGGCAACTACAAGACCCGCGCCGAGGTGAAGTTCGAGGGC
GACACCCTGGTGAACCGCATCGAGCTGAAGGGCATCGACTTCAAGGAGGACGGCAACATCCTGG
GGCACAAGCTGGAGTACAACTACAACAGCCACAACGTCTATATCATGGCCGACAAGCAGAAGAA
CGGCATCAAGGTGAACTTCAAGATCCGCCACAACATCGAGGACGGCAGCGTGCAGCTCGCCGAC
CACTACCAGCAGAACACCCCCATCGGCGACGGCCCCGTGCTGCTGCCCGACAACCACTACCTGA
GCACCCAGTCCGCCCTGAGCAAAGACCCCAACGAGAAGCGCGATCACATGGTCCTGCTGGAGTT
CGTGACCGCCGCCGGGATCACTCTCGGCATGGACGAGCTGTACAAGGAGGGCAGAGGAAGTCTT
CTAACATGCGGTGACGTGGAGGAGAATCCTGGCCCGATGGTGAGCAAGGGCGAGGAGGATAACA
TGGCCATCATCAAGGAGTTCATGCGCTTCAAGGTGCACATGGAGGGCTCCGTGAACGGCCACGA
GTTCGAGATCGAGGGCGAGGGCGAGGGCCGCCCCTACGAGGGCACCCAGACCGCCAAGCTGAAG
GTGACCAAGGGTGGCCCCCTGCCCTTCGCCTGGGACATCCTGTCCCCTCAGTTCATGTACGGCT
CCAAGGCCTACGTGAAGCACCCCGCCGACATCCCCGACTACTTGAAGCTGTCCTTCCCCGAGGG
CTTCAAGTGGGAGCGCGTGATGAACTTCGAGGACGGCGGCGTGGTGACCGTGACCCAGGACTCC
TCCCTGCAGGACGGCGAGTTCATCTACAAGGTGAAGCTGCGCGGCACCAACTTCCCCTCCGACG
GCCCCGTAATGCAGAAGAAGACAATGGGCTGGGAGGCCTCCTCCGAGCGGATGTACCCCGAGGA
CGGCGCCCTGAAGGGCGAGATCAAGCAGAGGCTGAAGCTGAAGGACGGCGGCCACTACGACGCT
GAGGTCAAGACCACCTACAAGGCCAAGAAGCCCGTGCAGCTGCCCGGCGCCTACAACGTCAACA
TCAAGTTGGACATCACCTCCCACAACGAGGACTACACCATCGTGGAACAGTACGAACGCGCCGA
GGGCCGCCACTCCACCGGCGGCATGGACGAGCTGTACAAGTAAGCGGCCGCGTCGAGTCTAGAG
GGCCCGTTTAAACCCGCTGATCAGCCTCGACTGTGCCTTCTAGTTGCCAGCCATCTGTTGTTTG
CCCCTCCCCCGTGCCTTCCTTGACCCTGGAAGGTGCCACTCCCACTGTCCTTTCCTAATAAAAT
GAGGAAATTGCATCGCATTGTCTGAGTAGGTGTCATTCTATTCTGGGGGGTGGGGTGGGGCAGG
ACAGCAAGGGGGAGGATTGGGAAGACAATAGCAGGCATGCTGGGGATGCGGTGGGCTCTATGGA
TTTGGCTACAGCAACAGGGTGGTGGACCTCATGGCCCACATGGCCTCCAAGGAGTAAGACCCCT
GGACCACCAGCCCCAGCAAGAGCACAAGAGGAAGAGAGAGACCCTCACTGCTGGGGAGTCCCTG
CCACACTCAGTCCCCCACCACACTGAATCTCCCCTCCTCACAGTTGCCATGTAGACCCCTTGAA
GAGGGGAGGGGCCTAGGGAGCCGCACCTTGTCATGTACCATCAATAAAGTACCCTGTGCTCAAC
CAGTTACTTGTCCTGTCTTATTCTAGGGTCTGGGGCAGAGGGGAGGGAAGCTGGGCTTGTGTCA
AGGTGAGACATTCTTGCTGGGGAGGGACCTGGTATGTTCTCCTCAGACTGAGGGTAGGGCCTCC
AAACAGCCTTGCTTGCTTCGAGAACCATTTGCTTCCCGCTCAGACGTCTTGAGTGCTACAGGAA
GCTGGCACCACTACTTCAGAGAACAAGGCCTTTTCCTCTCCTCGCTCCAGT
exemplary donor template for insertion at GAPDH locus
SEQ ID NO: 39
GAAGACTGTGGATGGCCCCTCCGGGAAACTGTGGCGTGATGGCCGCGGGGCTCTCCAGAACATC
ATCCCTGCCTCTACTGGCGCTGCCAAGGCTGTGGGCAAGGTCATCCCTGAGCTGAACGGGAAGC
TCACTGGCATGGCCTTCCGTGTCCCCACTGCCAACGTGTCAGTGGTGGACCTGACCTGCCGTCT
AGAAAAACCTGCCAAATATGATGACATCAAGAAGGTGGTGAAGCAGGCGTCGGAGGGCCCCCTC
AAGGGCATCCTGGGCTACACTGAGCACCAGGTGGTCTCCTCTGACTTCAACAGCGACACCCACT
CCTCCACCTTTGACGCTGGGGCTGGCATTGCCCTCAACGACCACTTTGTCAAGCTCATTTCCTG
GTATGTGGCTGGGGCCAGAGACTGGCTCTTAAAAAGTGCAGGGTCTGGCGCCCTCTGGTGGCTG
GCTCAGAAAAAGGGCCCTGACAACTCTTTACATCTTCTAGGTATGACAACGAGTTCGGATATAG
CAATAGAGTGGTCGATCTGATGGCTCATATGGCTAGCAAAGAGGGAAGCGGAGCTACTAACTTC
AGCCTGCTGAAGCAGGCTGGAGACGTGGAGGAGAACCCTGGACCTATGGTGAGCAAGGGCGAGG
AGCTGTTCACCGGGGTGGTGCCCATCCTGGTCGAGCTGGACGGCGACGTAAACGGCCACAAGTT
CAGCGTGTCCGGCGAGGGCGAGGGCGATGCCACCTACGGCAAGCTGACCCTGAAGTTCATCTGC
ACCACCGGCAAGCTGCCCGTGCCCTGGCCCACCCTCGTGACCACCCTGACCTACGGCGTGCAGT
GCTTCAGCCGCTACCCCGACCACATGAAGCAGCACGACTTCTTCAAGTCCGCCATGCCCGAAGG
CTACGTCCAGGAGCGCACCATCTTCTTCAAGGACGACGGCAACTACAAGACCCGCGCCGAGGTG
AAGTTCGAGGGCGACACCCTGGTGAACCGCATCGAGCTGAAGGGCATCGACTTCAAGGAGGACG
GCAACATCCTGGGGCACAAGCTGGAGTACAACTACAACAGCCACAACGTCTATATCATGGCCGA
CAAGCAGAAGAACGGCATCAAGGTGAACTTCAAGATCCGCCACAACATCGAGGACGGCAGCGTG
CAGCTCGCCGACCACTACCAGCAGAACACCCCCATCGGCGACGGCCCCGTGCTGCTGCCCGACA
ACCACTACCTGAGCACCCAGTCCGCCCTGAGCAAAGACCCCAACGAGAAGCGCGATCACATGGT
CCTGCTGGAGTTCGTGACCGCCGCCGGGATCACTCTCGGCATGGACGAGCTGTACAAGTAACCC
CTCTCCCTCCCCCCCCCCTAACGTTACTGGCCGAAGCCGCTTGGAATAAGGCCGGTGTGCGTTT
GTCTATATGTTATTTTCCACCATATTGCCGTCTTTTGGCAATGTGAGGGCCCGGAAACCTGGCC
CTGTCTTCTTGACGAGCATTCCTAGGGGTCTTTCCCCTCTCGCCAAAGGAATGCAAGGTCTGTT
GAATGTCGTGAAGGAAGCAGTTCCTCTGGAAGCTTCTTGAAGACAAACAACGTCTGTAGCGACC
CTTTGCAGGCAGCGGAACCCCCCACCTGGCGACAGGTGCCTCTGCGGCCAAAAGCCACGTGTAT
AAGATACACCTGCAAAGGCGGCACAACCCCAGTGCCACGTTGTGAGTTGGATAGTTGTGGAAAG
AGTCAAATGGCTCTCCTCAAGCGTATTCAACAAGGGGCTGAAGGATGCCCAGAAGGTACCCCAT
TGTATGGGATCTGATCTGGGGCCTCGGTGCACATGCTTTACATGTGTTTAGTCGAGGTTAAAAA
AACGTCTAGGCCCCCCGAACCACGGGGACGTGGTTTTCCTTTGAAAAACACGATGATAAATGGT
GAGCAAGGGCGAGGAGGATAACATGGCCATCATCAAGGAGTTCATGCGCTTCAAGGTGCACATG
GAGGGCTCCGTGAACGGCCACGAGTTCGAGATCGAGGGCGAGGGCGAGGGCCGCCCCTACGAGG
GCACCCAGACCGCCAAGCTGAAGGTGACCAAGGGTGGCCCCCTGCCCTTCGCCTGGGACATCCT
GTCCCCTCAGTTCATGTACGGCTCCAAGGCCTACGTGAAGCACCCCGCCGACATCCCCGACTAC
TTGAAGCTGTCCTTCCCCGAGGGCTTCAAGTGGGAGCGCGTGATGAACTTCGAGGACGGCGGCG
TGGTGACCGTGACCCAGGACTCCTCCCTGCAGGACGGCGAGTTCATCTACAAGGTGAAGCTGCG
CGGCACCAACTTCCCCTCCGACGGCCCCGTAATGCAGAAGAAGACAATGGGCTGGGAGGCCTCC
TCCGAGCGGATGTACCCCGAGGACGGCGCCCTGAAGGGCGAGATCAAGCAGAGGCTGAAGCTGA
AGGACGGCGGCCACTACGACGCTGAGGTCAAGACCACCTACAAGGCCAAGAAGCCCGTGCAGCT
GCCCGGCGCCTACAACGTCAACATCAAGTTGGACATCACCTCCCACAACGAGGACTACACCATC
GTGGAACAGTACGAACGCGCCGAGGGCCGCCACTCCACCGGCGGCATGGACGAGCTGTACAAGT
AAGCGGCCGCGTCGAGTCTAGAGGGCCCGTTTAAACCCGCTGATCAGCCTCGACTGTGCCTTCT
AGTTGCCAGCCATCTGTTGTTTGCCCCTCCCCCGTGCCTTCCTTGACCCTGGAAGGTGCCACTC
CCACTGTCCTTTCCTAATAAAATGAGGAAATTGCATCGCATTGTCTGAGTAGGTGTCATTCTAT
TCTGGGGGGTGGGGTGGGGCAGGACAGCAAGGGGGAGGATTGGGAAGACAATAGCAGGCATGCT
GGGGATGCGGTGGGCTCTATGGATTTGGCTACAGCAACAGGGTGGTGGACCTCATGGCCCACAT
GGCCTCCAAGGAGTAAGACCCCTGGACCACCAGCCCCAGCAAGAGCACAAGAGGAAGAGAGAGA
CCCTCACTGCTGGGGAGTCCCTGCCACACTCAGTCCCCCACCACACTGAATCTCCCCTCCTCAC
AGTTGCCATGTAGACCCCTTGAAGAGGGGAGGGGCCTAGGGAGCCGCACCTTGTCATGTACCAT
CAATAAAGTACCCTGTGCTCAACCAGTTACTTGTCCTGTCTTATTCTAGGGTCTGGGGCAGAGG
GGAGGGAAGCTGGGCTTGTGTCAAGGTGAGACATTCTTGCTGGGGAGGGACCTGGTATGTTCTC
CTCAGACTGAGGGTAGGGCCTCCAAACAGCCTTGCTTGCTTCGAGAACCATTTGCTTCCCGCTC
AGACGTCTTGAGTGCTACAGGAAGCTGGCACCACTACTTCAGAGAACAAGGCCTTTTCCTCTCC
TCGCTCCAGT
exemplary donor template for insertion at GAPDH locus
SEQ ID NO: 40
GAAGACTGTGGATGGCCCCTCCGGGAAACTGTGGCGTGATGGCCGCGGGGCTCTCCAGAACATC
ATCCCTGCCTCTACTGGCGCTGCCAAGGCTGTGGGCAAGGTCATCCCTGAGCTGAACGGGAAGC
TCACTGGCATGGCCTTCCGTGTCCCCACTGCCAACGTGTCAGTGGTGGACCTGACCTGCCGTCT
AGAAAAACCTGCCAAATATGATGACATCAAGAAGGTGGTGAAGCAGGCGTCGGAGGGCCCCCTC
AAGGGCATCCTGGGCTACACTGAGCACCAGGTGGTCTCCTCTGACTTCAACAGCGACACCCACT
CCTCCACCTTTGACGCTGGGGCTGGCATTGCCCTCAACGACCACTTTGTCAAGCTCATTTCCTG
GTATGTGGCTGGGGCCAGAGACTGGCTCTTAAAAAGTGCAGGGTCTGGCGCCCTCTGGTGGCTG
GCTCAGAAAAAGGGCCCTGACAACTCTTTACATCTTCTAGGTATGACAACGAGTTCGGATATAG
CAATAGAGTGGTCGATCTGATGGCTCATATGGCTAGCAAAGAGGGAAGCGGAGCTACTAACTTC
AGCCTGCTGAAGCAGGCTGGAGACGTGGAGGAGAACCCTGGACCTATGGTGAGCAAGGGCGAGG
AGCTGTTCACCGGGGTGGTGCCCATCCTGGTCGAGCTGGACGGCGACGTAAACGGCCACAAGTT
CAGCGTGTCCGGCGAGGGCGAGGGCGATGCCACCTACGGCAAGCTGACCCTGAAGTTCATCTGC
ACCACCGGCAAGCTGCCCGTGCCCTGGCCCACCCTCGTGACCACCCTGACCTACGGCGTGCAGT
GCTTCAGCCGCTACCCCGACCACATGAAGCAGCACGACTTCTTCAAGTCCGCCATGCCCGAAGG
CTACGTCCAGGAGCGCACCATCTTCTTCAAGGACGACGGCAACTACAAGACCCGCGCCGAGGTG
AAGTTCGAGGGCGACACCCTGGTGAACCGCATCGAGCTGAAGGGCATCGACTTCAAGGAGGACG
GCAACATCCTGGGGCACAAGCTGGAGTACAACTACAACAGCCACAACGTCTATATCATGGCCGA
CAAGCAGAAGAACGGCATCAAGGTGAACTTCAAGATCCGCCACAACATCGAGGACGGCAGCGTG
CAGCTCGCCGACCACTACCAGCAGAACACCCCCATCGGCGACGGCCCCGTGCTGCTGCCCGACA
ACCACTACCTGAGCACCCAGTCCGCCCTGAGCAAAGACCCCAACGAGAAGCGCGATCACATGGT
CCTGCTGGAGTTCGTGACCGCCGCCGGGATCACTCTCGGCATGGACGAGCTGTACAAGGGAAGC
GGAGCTACTAACTTCAGCCTGCTGAAGCAGGCTGGAGACGTGGAGGAGAACCCTGGACCTATGG
TGAGCAAGGGCGAGGAGGATAACATGGCCATCATCAAGGAGTTCATGCGCTTCAAGGTGCACAT
GGAGGGCTCCGTGAACGGCCACGAGTTCGAGATCGAGGGCGAGGGCGAGGGCCGCCCCTACGAG
GGCACCCAGACCGCCAAGCTGAAGGTGACCAAGGGTGGCCCCCTGCCCTTCGCCTGGGACATCC
TGTCCCCTCAGTTCATGTACGGCTCCAAGGCCTACGTGAAGCACCCCGCCGACATCCCCGACTA
CTTGAAGCTGTCCTTCCCCGAGGGCTTCAAGTGGGAGCGCGTGATGAACTTCGAGGACGGCGGC
GTGGTGACCGTGACCCAGGACTCCTCCCTGCAGGACGGCGAGTTCATCTACAAGGTGAAGCTGC
GCGGCACCAACTTCCCCTCCGACGGCCCCGTAATGCAGAAGAAGACAATGGGCTGGGAGGCCTC
CTCCGAGCGGATGTACCCCGAGGACGGCGCCCTGAAGGGCGAGATCAAGCAGAGGCTGAAGCTG
AAGGACGGCGGCCACTACGACGCTGAGGTCAAGACCACCTACAAGGCCAAGAAGCCCGTGCAGC
TGCCCGGCGCCTACAACGTCAACATCAAGTTGGACATCACCTCCCACAACGAGGACTACACCAT
CGTGGAACAGTACGAACGCGCCGAGGGCCGCCACTCCACCGGCGGCATGGACGAGCTGTACAAG
TAAGCGGCCGCGTCGAGTCTAGAGGGCCCGTTTAAACCCGCTGATCAGCCTCGACTGTGCCTTC
TAGTTGCCAGCCATCTGTTGTTTGCCCCTCCCCCGTGCCTTCCTTGACCCTGGAAGGTGCCACT
CCCACTGTCCTTTCCTAATAAAATGAGGAAATTGCATCGCATTGTCTGAGTAGGTGTCATTCTA
TTCTGGGGGGTGGGGTGGGGCAGGACAGCAAGGGGGAGGATTGGGAAGACAATAGCAGGCATGC
TGGGGATGCGGTGGGCTCTATGGATTTGGCTACAGCAACAGGGTGGTGGACCTCATGGCCCACA
TGGCCTCCAAGGAGTAAGACCCCTGGACCACCAGCCCCAGCAAGAGCACAAGAGGAAGAGAGAG
ACCCTCACTGCTGGGGAGTCCCTGCCACACTCAGTCCCCCACCACACTGAATCTCCCCTCCTCA
CAGTTGCCATGTAGACCCCTTGAAGAGGGGAGGGGCCTAGGGAGCCGCACCTTGTCATGTACCA
TCAATAAAGTACCCTGTGCTCAACCAGTTACTTGTCCTGTCTTATTCTAGGGTCTGGGGCAGAG
GGGAGGGAAGCTGGGCTTGTGTCAAGGTGAGACATTCTTGCTGGGGAGGGACCTGGTATGTTCT
CCTCAGACTGAGGGTAGGGCCTCCAAACAGCCTTGCTTGCTTCGAGAACCATTTGCTTCCCGCT
CAGACGTCTTGAGTGCTACAGGAAGCTGGCACCACTACTTCAGAGAACAAGGCCTTTTCCTCTC
CTCGCTCCAGT
exemplary donor template for insertion at GAPDH locus
SEQ ID NO: 41
GAAGACTGTGGATGGCCCCTCCGGGAAACTGTGGCGTGATGGCCGCGGGGCTCTCCAGAACATC
ATCCCTGCCTCTACTGGCGCTGCCAAGGCTGTGGGCAAGGTCATCCCTGAGCTGAACGGGAAGC
TCACTGGCATGGCCTTCCGTGTCCCCACTGCCAACGTGTCAGTGGTGGACCTGACCTGCCGTCT
AGAAAAACCTGCCAAATATGATGACATCAAGAAGGTGGTGAAGCAGGCGTCGGAGGGCCCCCTC
AAGGGCATCCTGGGCTACACTGAGCACCAGGTGGTCTCCTCTGACTTCAACAGCGACACCCACT
CCTCCACCTTTGACGCTGGGGCTGGCATTGCCCTCAACGACCACTTTGTCAAGCTCATTTCCTG
GTATGTGGCTGGGGCCAGAGACTGGCTCTTAAAAAGTGCAGGGTCTGGCGCCCTCTGGTGGCTG
GCTCAGAAAAAGGGCCCTGACAACTCTTTACATCTTCTAGGTATGACAACGAGTTCGGATATAG
CAATAGAGTGGTCGATCTGATGGCTCATATGGCTAGCAAAGAGGGAAGCGGAGCTACTAACTTC
AGCCTGCTGAAGCAGGCTGGAGACGTGGAGGAGAACCCTGGACCTATGGTGAGCAAGGGCGAGG
AGCTGTTCACCGGGGTGGTGCCCATCCTGGTCGAGCTGGACGGCGACGTAAACGGCCACAAGTT
CAGCGTGTCCGGCGAGGGCGAGGGCGATGCCACCTACGGCAAGCTGACCCTGAAGTTCATCTGC
ACCACCGGCAAGCTGCCCGTGCCCTGGCCCACCCTCGTGACCACCCTGACCTACGGCGTGCAGT
GCTTCAGCCGCTACCCCGACCACATGAAGCAGCACGACTTCTTCAAGTCCGCCATGCCCGAAGG
CTACGTCCAGGAGCGCACCATCTTCTTCAAGGACGACGGCAACTACAAGACCCGCGCCGAGGTG
AAGTTCGAGGGCGACACCCTGGTGAACCGCATCGAGCTGAAGGGCATCGACTTCAAGGAGGACG
GCAACATCCTGGGGCACAAGCTGGAGTACAACTACAACAGCCACAACGTCTATATCATGGCCGA
CAAGCAGAAGAACGGCATCAAGGTGAACTTCAAGATCCGCCACAACATCGAGGACGGCAGCGTG
CAGCTCGCCGACCACTACCAGCAGAACACCCCCATCGGCGACGGCCCCGTGCTGCTGCCCGACA
ACCACTACCTGAGCACCCAGTCCGCCCTGAGCAAAGACCCCAACGAGAAGCGCGATCACATGGT
CCTGCTGGAGTTCGTGACCGCCGCCGGGATCACTCTCGGCATGGACGAGCTGTACAAGGAGGGC
AGAGGAAGTCTTCTAACATGCGGTGACGTGGAGGAGAATCCTGGCCCGATGGTGAGCAAGGGCG
AGGAGGATAACATGGCCATCATCAAGGAGTTCATGCGCTTCAAGGTGCACATGGAGGGCTCCGT
GAACGGCCACGAGTTCGAGATCGAGGGCGAGGGCGAGGGCCGCCCCTACGAGGGCACCCAGACC
GCCAAGCTGAAGGTGACCAAGGGTGGCCCCCTGCCCTTCGCCTGGGACATCCTGTCCCCTCAGT
TCATGTACGGCTCCAAGGCCTACGTGAAGCACCCCGCCGACATCCCCGACTACTTGAAGCTGTC
CTTCCCCGAGGGCTTCAAGTGGGAGCGCGTGATGAACTTCGAGGACGGCGGCGTGGTGACCGTG
ACCCAGGACTCCTCCCTGCAGGACGGCGAGTTCATCTACAAGGTGAAGCTGCGCGGCACCAACT
TCCCCTCCGACGGCCCCGTAATGCAGAAGAAGACAATGGGCTGGGAGGCCTCCTCCGAGCGGAT
GTACCCCGAGGACGGCGCCCTGAAGGGCGAGATCAAGCAGAGGCTGAAGCTGAAGGACGGCGGC
CACTACGACGCTGAGGTCAAGACCACCTACAAGGCCAAGAAGCCCGTGCAGCTGCCCGGCGCCT
ACAACGTCAACATCAAGTTGGAGATCACCTCCCACAACGAGGACTAGACCATCGTGGAACAGTA
CGAACGCGCCGAGGGCCGCCACTCCACCGGCGGCATGGACGAGCTGTACAAGTAAGCGGCCGCG
TCGAGTCTAGAGGGCCCGTTTAAACCCGCTGATCAGCCTCGACTGTGCCTTCTAGTTGCCAGCC
ATCTGTTGTTTGCCCCTCCCCCGTGCCTTCCTTGACCCTGGAAGGTGCCACTCCCACTGTCCTT
TCCTAATAAAATGAGGAAATTGCATCGCATTGTCTGAGTAGGTGTCATTCTATTCTGGGGGGTG
GGGTGGGGCAGGACAGCAAGGGGGAGGATTGGGAAGACAATAGCAGGCATGCTGGGGATGCGGT
GGGCTCTATGGATTTGGCTACAGCAACAGGGTGGTGGACCTCATGGCCCACATGGCCTCCAAGG
AGTAAGACCCCTGGACCACCAGCCCCAGCAAGAGCACAAGAGGAAGAGAGAGACCCTCACTGCT
GGGGAGTCCCTGCCACACTCAGTCCCCCACCACACTGAATCTCCCCTCCTCACAGTTGCCATGT
AGACCCCTTGAAGAGGGGAGGGGCCTAGGGAGCCGCACCTTGTCATGTACCATCAATAAAGTAC
CCTGTGCTCAACCAGTTACTTGTCCTGTCTTATTCTAGGGTCTGGGGCAGAGGGGAGGGAAGCT
GGGCTTGTGTCAAGGTGAGACATTCTTGCTGGGGAGGGACCTGGTATGTTCTCCTCAGACTGAG
GGTAGGGCCTCCAAACAGCCTTGCTTGCTTCGAGAACCATTTGCTTCCCGCTCAGACGTCTTGA
GTGCTACAGGAAGCTGGCACCACTACTTCAGAGAACAAGGCCTTTTCCTCTCCTCGCTCCAGT
exemplary donor template for insertion at GAPDH locus
SEQ ID NO: 42
GAAGACTGTGGATGGCCCCTCCGGGAAACTGTGGCGTGATGGCCGCGGGGCTCTCCAGAACATC
ATCCCTGCCTCTACTGGCGCTGCCAAGGCTGTGGGCAAGGTCATCCCTGAGCTGAACGGGAAGC
TCACTGGCATGGCCTTCCGTGTCCCCACTGCCAACGTGTCAGTGGTGGACCTGACCTGCCGTCT
AGAAAAACCTGCCAAATATGATGACATCAAGAAGGTGGTGAAGCAGGCGTCGGAGGGCCCCCTC
AAGGGCATCCTGGGCTACACTGAGCACCAGGTGGTCTCCTCTGACTTCAACAGCGACACCCACT
CCTCCACCTTTGACGCTGGGGCTGGCATTGCCCTCAACGACCACTTTGTCAAGCTCATTTCCTG
GTATGTGGCTGGGGCCAGAGACTGGCTCTTAAAAAGTGCAGGGTCTGGCGCCCTCTGGTGGCTG
GCTCAGAAAAAGGGCCCTGACAACTCTTTACATCTTCTAGGTATGACAACGAGTTCGGATATAG
CAATAGAGTGGTCGATCTGATGGCTCATATGGCTAGCAAAGAGGAGGGCAGAGGAAGTCTTCTA
ACATGCGGTGACGTGGAGGAGAATCCTGGCCCGATGGTGAGCAAGGGCGAGGAGCTGTTCACCG
GGGTGGTGCCCATCCTGGTCGAGCTGGACGGCGACGTAAACGGCCACAAGTTCAGCGTGTCCGG
CGAGGGCGAGGGCGATGCCACCTACGGCAAGCTGACCCTGAAGTTCATCTGCACCACCGGCAAG
CTGCCCGTGCCCTGGCCCACCCTCGTGACCACCCTGACCTACGGCGTGCAGTGCTTCAGCCGCT
ACCCCGACCACATGAAGCAGCACGACTTCTTCAAGTCCGCCATGCCCGAAGGCTACGTCCAGGA
GCGCACCATCTTCTTCAAGGACGACGGCAACTACAAGACCCGCGCCGAGGTGAAGTTCGAGGGC
GACACCCTGGTGAACCGCATCGAGCTGAAGGGCATCGACTTCAAGGAGGACGGCAACATCCTGG
GGCACAAGCTGGAGTACAACTACAACAGCCACAACGTCTATATCATGGCCGACAAGCAGAAGAA
CGGCATCAAGGTGAACTTCAAGATCCGCCACAACATCGAGGACGGCAGCGTGCAGCTCGCCGAC
CACTACCAGCAGAACACCCCCATCGGCGACGGCCCCGTGCTGCTGCCCGACAACCACTACCTGA
GCACCCAGTCCGCCCTGAGCAAAGACCCCAACGAGAAGCGCGATCACATGGTCCTGCTGGAGTT
CGTGACCGCCGCCGGGATCACTCTCGGCATGGACGAGCTGTACAAGGGAAGCGGAGCTACTAAC
TTCAGCCTGCTGAAGCAGGCTGGAGACGTGGAGGAGAACCCTGGACCTATGGTGAGCAAGGGCG
AGGAGGATAACATGGCCATCATCAAGGAGTTCATGCGCTTCAAGGTGCACATGGAGGGCTCCGT
GAACGGCCACGAGTTCGAGATCGAGGGCGAGGGCGAGGGCCGCCCCTACGAGGGCACCCAGACC
GCCAAGCTGAAGGTGACCAAGGGTGGCCCCCTGCCCTTCGCCTGGGACATCCTGTCCCCTCAGT
TCATGTACGGCTCCAAGGCCTACGTGAAGCACCCCGCCGACATCCCCGACTACTTGAAGCTGTC
CTTCCCCGAGGGCTTCAAGTGGGAGCGCGTGATGAACTTCGAGGACGGCGGCGTGGTGACCGTG
ACCCAGGACTCCTCCCTGCAGGACGGCGAGTTCATCTACAAGGTGAAGCTGCGCGGCACCAACT
TCCCCTCCGACGGCCCCGTAATGCAGAAGAAGACAATGGGCTGGGAGGCCTCCTCCGAGCGGAT
GTACCCCGAGGACGGCGCCCTGAAGGGCGAGATCAAGCAGAGGCTGAAGCTGAAGGACGGCGGC
CACTACGACGCTGAGGTCAAGACCACCTACAAGGCCAAGAAGCCCGTGCAGCTGCCCGGCGCCT
ACAACGTCAACATCAAGTTGGAGATCACCTCCCACAACGAGGACTAGACCATCGTGGAACAGTA
CGAACGCGCCGAGGGCCGCCACTCCACCGGCGGCATGGACGAGCTGTACAAGTAAGCGGCCGCG
TCGAGTCTAGAGGGCCCGTTTAAACCCGCTGATCAGCCTCGACTGTGCCTTCTAGTTGCCAGCC
ATCTGTTGTTTGCCCCTCCCCCGTGCCTTCCTTGACCCTGGAAGGTGCCACTCCCACTGTCCTT
TCCTAATAAAATGAGGAAATTGCATCGCATTGTCTGAGTAGGTGTCATTCTATTCTGGGGGGTG
GGGTGGGGCAGGACAGCAAGGGGGAGGATTGGGAAGACAATAGCAGGCATGCTGGGGATGCGGT
GGGCTCTATGGATTTGGCTACAGCAACAGGGTGGTGGACCTCATGGCCCACATGGCCTCCAAGG
AGTAAGACCCCTGGACCACCAGCCCCAGCAAGAGCACAAGAGGAAGAGAGAGACCCTCACTGCT
GGGGAGTCCCTGCCACACTCAGTCCCCCACCACACTGAATCTCCCCTCCTCACAGTTGCCATGT
AGACCCCTTGAAGAGGGGAGGGGCCTAGGGAGCCGCACCTTGTCATGTACCATCAATAAAGTAC
CCTGTGCTCAACCAGTTACTTGTCCTGTCTTATTCTAGGGTCTGGGGCAGAGGGGAGGGAAGCT
GGGCTTGTGTCAAGGTGAGACATTCTTGCTGGGGAGGGACCTGGTATGTTCTCCTCAGACTGAG
GGTAGGGCCTCCAAACAGCCTTGCTTGCTTCGAGAACCATTTGCTTCCCGCTCAGACGTCTTGA
GTGCTACAGGAAGCTGGCACCACTACTTCAGAGAACAAGGCCTTTTCCTCTCCTCGCTCCAGT
exemplary donor template for insertion at GAPDH locus
SEQ ID NO: 43
GAAGACTGTGGATGGCCCCTCCGGGAAACTGTGGCGTGATGGCCGCGGGGCTCTCCAGAACATC
ATCCCTGCCTCTACTGGCGCTGCCAAGGCTGTGGGCAAGGTCATCCCTGAGCTGAACGGGAAGC
TCACTGGCATGGCCTTCCGTGTCCCCACTGCCAACGTGTCAGTGGTGGACCTGACCTGCCGTCT
AGAAAAACCTGCCAAATATGATGACATCAAGAAGGTGGTGAAGCAGGCGTCGGAGGGCCCCCTC
AAGGGCATCCTGGGCTACACTGAGCACCAGGTGGTCTCCTCTGACTTCAACAGCGACACCCACT
CCTCCACCTTTGACGCTGGGGCTGGCATTGCCCTCAACGACCACTTTGTCAAGCTCATTTCCTG
GTATGTGGCTGGGGCCAGAGACTGGCTCTTAAAAAGTGCAGGGTCTGGCGCCCTCTGGTGGCTG
GCTCAGAAAAAGGGCCCTGACAACTCTTTACATCTTCTAGGTATGACAACGAGTTCGGATATAG
CAATAGAGTGGTCGATCTGATGGCTCATATGGCTAGCAAAGAGGAGGGCAGAGGAAGTCTTCTA
ACATGCGGTGACGTGGAGGAGAATCCTGGCCCGATGGTGAGCAAGGGCGAGGAGCTGTTCACCG
GGGTGGTGCCCATCCTGGTCGAGCTGGACGGCGACGTAAACGGCCACAAGTTCAGCGTGTCCGG
CGAGGGCGAGGGCGATGCCACCTACGGCAAGCTGACCCTGAAGTTCATCTGCACCACCGGCAAG
CTGCCCGTGCCCTGGCCCACCCTCGTGACCACCCTGACCTACGGCGTGCAGTGCTTCAGCCGCT
ACCCCGACCACATGAAGCAGCACGACTTCTTCAAGTCCGCCATGCCCGAAGGCTACGTCCAGGA
GCGCACCATCTTCTTCAAGGACGACGGCAACTACAAGACCCGCGCCGAGGTGAAGTTCGAGGGC
GACACCCTGGTGAACCGCATCGAGCTGAAGGGCATCGACTTCAAGGAGGACGGCAACATCCTGG
GGCACAAGCTGGAGTACAACTACAACAGCCACAACGTCTATATCATGGCCGACAAGCAGAAGAA
CGGCATCAAGGTGAACTTCAAGATCCGCCACAACATCGAGGACGGCAGCGTGCAGCTCGCCGAC
CACTACCAGCAGAACACCCCCATCGGCGACGGCCCCGTGCTGCTGCCCGACAACCACTACCTGA
GCACCCAGTCCGCCCTGAGCAAAGACCCCAACGAGAAGCGCGATCACATGGTCCTGCTGGAGTT
CGTGACCGCCGCCGGGATCACTCTCGGCATGGACGAGCTGTACAAGTAACCCCTCTCCCTCCCC
CCCCCCTAACGTTACTGGCCGAAGCCGCTTGGAATAAGGCCGGTGTGCGTTTGTCTATATGTTA
TTTTCCACCATATTGCCGTCTTTTGGCAATGTGAGGGCCCGGAAACCTGGCCCTGTCTTCTTGA
CGAGCATTCCTAGGGGTCTTTCCCCTCTCGCCAAAGGAATGCAAGGTCTGTTGAATGTCGTGAA
GGAAGCAGTTCCTCTGGAAGCTTCTTGAAGACAAACAACGTCTGTAGCGACCCTTTGCAGGCAG
CGGAACCCCCCACCTGGCGACAGGTGCCTCTGCGGCCAAAAGCCACGTGTATAAGATACACCTG
CAAAGGCGGCACAACCCCAGTGCCACGTTGTGAGTTGGATAGTTGTGGAAAGAGTCAAATGGCT
CTCCTCAAGCGTATTCAACAAGGGGCTGAAGGATGCCCAGAAGGTACCCCATTGTATGGGATCT
GATCTGGGGCCTCGGTGCACATGCTTTACATGTGTTTAGTCGAGGTTAAAAAAACGTCTAGGCC
CCCCGAACCACGGGGACGTGGTTTTCCTTTGAAAAACACGATGATAAATGGTGAGCAAGGGCGA
GGAGGATAACATGGCCATCATCAAGGAGTTCATGCGCTTCAAGGTGCACATGGAGGGCTCCGTG
AACGGCCACGAGTTCGAGATCGAGGGCGAGGGCGAGGGCCGCCCCTACGAGGGCACCCAGACCG
CCAAGCTGAAGGTGACCAAGGGTGGCCCCCTGCCCTTCGCCTGGGACATCCTGTCCCCTCAGTT
CATGTACGGCTCCAAGGCCTACGTGAAGCACCCCGCCGACATCCCCGACTACTTGAAGCTGTCC
TTCCCCGAGGGCTTCAAGTGGGAGCGCGTGATGAACTTCGAGGACGGCGGCGTGGTGACCGTGA
CCCAGGACTCCTCCCTGCAGGACGGCGAGTTCATCTACAAGGTGAAGCTGCGCGGCACCAACTT
CCCCTCCGACGGCCCCGTAATGCAGAAGAAGACAATGGGCTGGGAGGCCTCCTCCGAGCGGATG
TACCCCGAGGACGGCGCCCTGAAGGGCGAGATCAAGCAGAGGCTGAAGCTGAAGGACGGCGGCC
ACTACGACGCTGAGGTCAAGACCACCTACAAGGCCAAGAAGCCCGTGCAGCTGCCCGGCGCCTA
CAACGTCAACATCAAGTTGGAGATCACCTCCCACAACGAGGAGTAGACCATCGTGGAACAGTAG
GAACGCGCCGAGGGCCGCCACTCCACCGGCGGCATGGACGAGCTGTACAAGTAAGCGGCCGCGT
CGAGTCTAGAGGGCCCGTTTAAACCCGCTGATCAGCCTCGACTGTGCCTTCTAGTTGCCAGCCA
TCTGTTGTTTGCCCCTCCCCCGTGCCTTCCTTGACCCTGGAAGGTGCCACTCCCACTGTCCTTT
CCTAATAAAATGAGGAAATTGCATCGCATTGTCTGAGTAGGTGTCATTCTATTCTGGGGGGTGG
GGTGGGGCAGGACAGCAAGGGGGAGGATTGGGAAGACAATAGCAGGCATGCTGGGGATGCGGTG
GGCTCTATGGATTTGGCTACAGCAACAGGGTGGTGGACCTCATGGCCCACATGGCCTCCAAGGA
GTAAGACCCCTGGACCACCAGCCCCAGCAAGAGCACAAGAGGAAGAGAGAGACCCTCACTGCTG
GGGAGTCCCTGCCACACTCAGTCCCCCACCACACTGAATCTCCCCTCCTCACAGTTGCCATGTA
GACCCCTTGAAGAGGGGAGGGGCCTAGGGAGCCGCACCTTGTCATGTACCATCAATAAAGTACC
CTGTGCTCAACCAGTTACTTGTCCTGTCTTATTCTAGGGTCTGGGGCAGAGGGGAGGGAAGCTG
GGCTTGTGTCAAGGTGAGACATTCTTGCTGGGGAGGGACCTGGTATGTTCTCCTCAGACTGAGG
GTAGGGCCTCCAAACAGCCTTGCTTGCTTCGAGAACCATTTGCTTCCCGCTCAGACGTCTTGAG
TGCTACAGGAAGCTGGCACCACTACTTCAGAGAACAAGGCCTTTTCCTCTCCTCGCTCCAGT
exemplary donor template for insertion at GAPDH locus
SEQ ID NO: 44
GAAGACTGTGGATGGCCCCTCCGGGAAACTGTGGCGTGATGGCCGCGGGGCTCTCCAGAACATC
ATCCCTGCCTCTACTGGCGCTGCCAAGGCTGTGGGCAAGGTCATCCCTGAGCTGAACGGGAAGC
TCACTGGCATGGCCTTCCGTGTCCCCACTGCCAACGTGTCAGTGGTGGACCTGACCTGCCGTCT
AGAAAAACCTGCCAAATATGATGACATCAAGAAGGTGGTGAAGCAGGCGTCGGAGGGCCCCCTC
AAGGGCATCCTGGGCTACACTGAGCACCAGGTGGTCTCCTCTGACTTCAACAGCGACACCCACT
CCTCCACCTTTGACGCTGGGGCTGGCATTGCCCTCAACGACCACTTTGTCAAGCTCATTTCCTG
GTATGTGGCTGGGGCCAGAGACTGGCTCTTAAAAAGTGCAGGGTCTGGCGCCCTCTGGTGGCTG
GCTCAGAAAAAGGGCCCTGACAACTCTTTACATCTTCTAGGTATGACAACGAGTTCGGATATAG
CAATAGAGTGGTCGATCTGATGGCTCATATGGCTAGCAAAGAGGGAAGCGGAGCTACTAACTTC
AGCCTGCTGAAGCAGGCTGGAGACGTGGAGGAGAACCCTGGACCTATGGTGAGCAAGGGCGAGG
AGCTGTTCACCGGGGTGGTGCCCATCCTGGTCGAGCTGGACGGCGACGTAAACGGCCACAAGTT
CAGCGTGTCCGGCGAGGGCGAGGGCGATGCCACCTACGGCAAGCTGACCCTGAAGTTCATCTGC
ACCACCGGCAAGCTGCCCGTGCCCTGGCCCACCCTCGTGACCACCCTGACCTACGGCGTGCAGT
GCTTCAGCCGCTACCCCGACCACATGAAGCAGCACGACTTCTTCAAGTCCGCCATGCCCGAAGG
CTACGTCCAGGAGCGCACCATCTTCTTCAAGGACGACGGCAACTACAAGACCCGCGCCGAGGTG
AAGTTCGAGGGCGACACCCTGGTGAACCGCATCGAGCTGAAGGGCATCGACTTCAAGGAGGACG
GCAACATCCTGGGGCACAAGCTGGAGTACAACTACAACAGCCACAACGTCTATATCATGGCCGA
CAAGCAGAAGAACGGCATCAAGGTGAACTTCAAGATCCGCCACAACATCGAGGACGGCAGCGTG
CAGCTCGCCGACCACTACCAGCAGAACACCCCCATCGGCGACGGCCCCGTGCTGCTGCCCGACA
ACCACTACCTGAGCACCCAGTCCGCCCTGAGCAAAGACCCCAACGAGAAGCGCGATCACATGGT
CCTGCTGGAGTTCGTGACCGCCGCCGGGATCACTCTCGGCATGGACGAGCTGTACAAGTGAGCG
GCCGCGTCGAGTCTAGAGGGCCCGTTTAAACCCGCTGATCAGCCTCGACTGTGCCTTCTAGTTG
CCAGCCATCTGTTGTTTGCCCCTCCCCCGTGCCTTCCTTGACCCTGGAAGGTGCCACTCCCACT
GTCCTTTCCTAATAAAATGAGGAAATTGCATCGCATTGTCTGAGTAGGTGTCATTCTATTCTGG
GGGGTGGGGTGGGGCAGGACAGCAAGGGGGAGGATTGGGAAGACAATAGCAGGCATGCTGGGGA
TGCGGTGGGCTCTATGGATTTGGCTACAGCAACAGGGTGGTGGACCTCATGGCCCACATGGCCT
CCAAGGAGTAAGACCCCTGGACCACCAGCCCCAGCAAGAGCACAAGAGGAAGAGAGAGACCCTC
ACTGCTGGGGAGTCCCTGCCACACTCAGTCCCCCACCACACTGAATCTCCCCTCCTCACAGTTG
CCATGTAGACCCCTTGAAGAGGGGAGGGGCCTAGGGAGCCGCACCTTGTCATGTACCATCAATA
AAGTACCCTGTGCTCAACCAGTTACTTGTCCTGTCTTATTCTAGGGTCTGGGGCAGAGGGGAGG
GAAGCTGGGCTTGTGTCAAGGTGAGACATTCTTGCTGGGGAGGGACCTGGTATGTTCTCCTCAG
ACTGAGGGTAGGGCCTCCAAACAGCCTTGCTTGCTTCGAGAACCATTTGCTTCCCGCTCAGACG
TCTTGAGTGCTACAGGAAGCTGGCACCACTACTTCAGAGAACAAGGCCTTTTCCTCTCCTCGCT
CCAGT
exemplary donor template for insertion at GAPDH locus
SEQ ID NO: 45
GAAGACTGTGGATGGCCCCTCCGGGAAACTGTGGCGTGATGGCCGCGGGGCTCTCCAGAACATC
ATCCCTGCCTCTACTGGCGCTGCCAAGGCTGTGGGCAAGGTCATCCCTGAGCTGAACGGGAAGC
TCACTGGCATGGCCTTCCGTGTCCCCACTGCCAACGTGTCAGTGGTGGACCTGACCTGCCGTCT
AGAAAAACCTGCCAAATATGATGACATCAAGAAGGTGGTGAAGCAGGCGTCGGAGGGCCCCCTC
AAGGGCATCCTGGGCTACACTGAGCACCAGGTGGTCTCCTCTGACTTCAACAGCGACACCCACT
CCTCCACCTTTGACGCTGGGGCTGGCATTGCCCTCAACGACCACTTTGTCAAGCTCATTTCCTG
GTATGTGGCTGGGGCCAGAGACTGGCTCTTAAAAAGTGCAGGGTCTGGCGCCCTCTGGTGGCTG
GCTCAGAAAAAGGGCCCTGACAACTCTTTACATCTTCTAGGTATGACAACGAGTTCGGATATAG
CAATAGAGTGGTCGATCTGATGGCTCATATGGCTAGCAAAGAGGGAAGCGGAGCTACTAACTTC
AGCCTGCTGAAGCAGGCTGGAGACGTGGAGGAGAACCCTGGACCTATGGATTGGACCTGGATCC
TGTTTCTGGTGGCCGCTGCCACAAGAGTGCACAGCAATTGGGTCAACGTGATCAGCGACCTGAA
GAAGATCGAGGAGCTGATCCAGAGCATGCACATCGAGGCCACACTGTAGACCGAGTCCGATGTG
CACCCTAGCTGCAAAGTGACCGCCATGAAGTGCTTTCTGCTGGAACTGCAAGTGATCAGCCTGG
AAAGCGGCGACGCCAGCATCCACGATACCGTGGAAAACCTGATCATCCTGGCCAACAACAGCCT
GAGCAGCAACGGCAATGTGACCGAGAGCGGCTGCAAAGAGTGCGAGGAACTGGAAGAGAAGAAC
ATCAAAGAGTTCCTCCAGAGCTTCGTCCACATCGTGCAGATGTTCATCAACACCAGCTCTGGCG
GAGGAAGCGGAGGCGGAGGATCTGGTGGTGGTGGATCTGGCGGCGGTGGTAGTGGCGGAGGTTC
TCTGCAAATCACCTGTCCTCCACCTATGAGCGTGGAACACGCCGACATCTGGGTCAAGAGCTAC
AGCCTGTACAGCAGAGAGCGGTACATCTGCAACAGCGGCTTCAAGAGAAAGGCCGGCACAAGCA
GCCTGACCGAGTGTGTGCTGAACAAGGCCACAAACGTGGCCCACTGGACCACACCTAGCCTGAA
GTGCATCAGAGATCCCGCTCTGGTTCATCAGAGGCCTGCCCCTCCATCTACAGTGACAACAGCT
GGCGTGACCCCTCAGCCTGAGTCTCTGTCTCCATCTGGAAAAGAGCCTGCCGCCAGCTCTCCCA
GCTCTAACAATACTGCTGCCACCACAGCCGCTATCGTGCCTGGATCTCAGCTGATGCCTAGCAA
GAGCCCTAGCACCGGCACAACAGAGATCAGCTCTCACGAGAGCAGCCACGGAACACCTTCTCAG
ACCACCGCCAAGAATTGGGAGCTGACAGCCTCTGCCTCTCATCAGCCACCTGGCGTGTACCCAC
AGGGCCACTCTGATACAACAGTGGCCATCAGCACCAGCACCGTTCTGCTGTGTGGCCTGTCTGC
TGTTAGCCTGCTGGCCTGCTACCTGAAGTCTAGACAGACACCTCCTCTGGCCAGCGTGGAAATG
GAAGCCATGGAAGCTCTGCCTGTCACATGGGGCACCAGCAGCAGAGATGAGGACCTCGAGAATT
GCAGCCACCACCTGTAGGCGGCCGCGTCGAGTCTAGAGGGCCCGTTTAAACCCGCTGATCAGCC
TCGACTGTGCCTTCTAGTTGCCAGCCATCTGTTGTTTGCCCCTCCCCCGTGCCTTCCTTGACCC
TGGAAGGTGCCACTCCCACTGTCCTTTCCTAATAAAATGAGGAAATTGCATCGCATTGTCTGAG
TAGGTGTCATTCTATTCTGGGGGGTGGGGTGGGGCAGGACAGCAAGGGGGAGGATTGGGAAGAC
AATAGCAGGCATGCTGGGGATGCGGTGGGCTCTATGGATTTGGCTACAGCAACAGGGTGGTGGA
CCTCATGGCCCACATGGCCTCCAAGGAGTAAGACCCCTGGACCACCAGCCCCAGCAAGAGCACA
AGAGGAAGAGAGAGACCCTCACTGCTGGGGAGTCCCTGCCACACTCAGTCCCCCACCACACTGA
ATCTCCCCTCCTCACAGTTGCCATGTAGACCCCTTGAAGAGGGGAGGGGCCTAGGGAGCCGCAC
CTTGTCATGTACCATCAATAAAGTACCCTGTGCTCAACCAGTTACTTGTCCTGTCTTATTCTAG
GGTCTGGGGCAGAGGGGAGGGAAGCTGGGCTTGTGTCAAGGTGAGACATTCTTGCTGGGGAGGG
ACCTGGTATGTTCTCCTCAGACTGAGGGTAGGGCCTCCAAACAGCCTTGCTTGCTTCGAGAACC
ATTTGCTTCCCGCTCAGACGTCTTGAGTGCTACAGGAAGCTGGCACCACTACTTCAGAGAACAA
GGCCTTTTCCTCTCCTCGCTCCAGT
exemplary donor template for insertion at GAPDH locus
SEQ ID NO: 46
GGCTTTCCCATAATTTCCTTTCAAGGTGGGGAGGGAGGTAGAGGGGTGATGTGGGGAGTACGCT
GCAGGGCCTCACTCCTTTTGCAGACCACAGTCCATGCCATCACTGCCACCCAGAAGACTGTGGA
TGGCCCCTCCGGGAAACTGTGGCGTGATGGCCGCGGGGCTCTCCAGAACATCATCCCTGCCTCT
ACTGGCGCTGCCAAGGCTGTGGGCAAGGTCATCCCTGAGCTGAACGGGAAGCTCACTGGCATGG
CCTTCCGTGTCCCCACTGCCAACGTGTCAGTGGTGGACCTGACCTGCCGTCTAGAAAAACCTGC
CAAATATGATGACATCAAGAAGGTGGTGAAGCAGGCGTCGGAGGGCCCCCTCAAGGGCATCCTG
GGCTACACTGAGCACCAGGTGGTCTCCTCTGACTTCAACAGCGACACCCACTCCTCCACCTTTG
ACGCTGGGGCTGGCATTGCCCTCAACGACCACTTTGTCAAGCTCATCTCTTGGTACGACAATGA
GTTCGGATATAGCAATAGAGTGGTCGATCTGATGGCTCATATGGCTAGCAAAGAGGGAAGCGGA
GCTACTAACTTCAGCCTGCTGAAGCAGGCTGGAGACGTGGAGGAGAACCCTGGACCTATGGTGA
GCAAGGGCGAGGAGCTGTTCACCGGGGTGGTGCCCATCCTGGTCGAGCTGGACGGCGACGTAAA
CGGCCACAAGTTCAGCGTGTCCGGCGAGGGCGAGGGCGATGCCACCTACGGCAAGCTGACCCTG
AAGTTCATCTGCACCACCGGCAAGCTGCCCGTGCCCTGGCCCACCCTCGTGACCACCCTGACCT
ACGGCGTGCAGTGCTTCAGCCGCTACCCCGACCACATGAAGCAGCACGACTTCTTCAAGTCCGC
CATGCCCGAAGGCTACGTCCAGGAGCGCACCATCTTCTTCAAGGACGACGGCAACTACAAGACC
CGCGCCGAGGTGAAGTTCGAGGGCGACACCCTGGTGAACCGCATCGAGCTGAAGGGCATCGACT
TCAAGGAGGACGGCAACATCCTGGGGCACAAGCTGGAGTACAACTACAACAGCCACAACGTCTA
TATCATGGCCGACAAGCAGAAGAACGGCATCAAGGTGAACTTCAAGATCCGCCACAACATCGAG
GACGGCAGCGTGCAGCTCGCCGACCACTACCAGCAGAACACCCCCATCGGCGACGGCCCCGTGC
TGCTGCCCGACAACCACTACCTGAGCACCCAGTCCGCCCTGAGCAAAGACCCCAACGAGAAGCG
CGATCACATGGTCCTGCTGGAGTTCGTGACCGCCGCCGGGATCACTCTCGGCATGGACGAGCTG
TACAAGTGAGCGGCCGCGTCGAGTCTAGAGGGCCCGTTTAAACCCGCTGATCAGCCTCGACTGT
GCCTTCTAGTTGCCAGCCATCTGTTGTTTGCCCCTCCCCCGTGCCTTCCTTGACCCTGGAAGGT
GCCACTCCCACTGTCCTTTCCTAATAAAATGAGGAAATTGCATCGCATTGTCTGAGTAGGTGTC
ATTCTATTCTGGGGGGTGGGGTGGGGCAGGACAGCAAGGGGGAGGATTGGGAAGACAATAGCAG
GCATGCTGGGGATGCGGTGGGCTCTATGGAGACTGGCTCTTAAAAAGTGCAGGGTCTGGCGCCC
TCTGGTGGCTGGCTCAGAAAAAGGGCCCTGACAACTCTTTTCATCTTCTAGGTATGACAACGAA
TTTGGCTACAGCAACAGGGTGGTGGACCTCATGGCCCACATGGCCTCCAAGGAGTAAGACCCCT
GGACCACCAGCCCCAGCAAGAGCACAAGAGGAAGAGAGAGACCCTCACTGCTGGGGAGTCCCTG
CCACACTCAGTCCCCCACCACACTGAATCTCCCCTCCTCACAGTTGCCATGTAGACCCCTTGAA
GAGGGGAGGGGCCTAGGGAGCCGCACCTTGTCATGTACCATCAATAAAGTACCCTGTGCTCAAC
CAGTTACTTGTCCTGTCTTATTCTAGGGTCTGGGGCAGAGGGGAGGGAAGCTGGGCTTGTGTCA
AGGTGAGACATTCTTGCTGGGGAGGGACCTGGTATGTTCTCCTCAGACTGAGGGTAGGGCCTCC
AAACAGCCTTGCTTGCT
exemplary donor template for insertion at TBP locus
SEQ ID NO: 47
GCAGACTTCCATTTACAGTGAGGAGGTGAGCATTGCATTGAACAAAAGATGGCGTTTTCACTTG
GAATTAGTTATCTGAAGCTTTAGGATTCCTCAGCAATATGATTATGAGACAAGAAAGGAAGATT
CAGAAATGAGTCTAGTTGAAGGGAGCAATTCAGAGAAGAAGATTGAGTTGTTATCATTGCCGTC
CTGCTTGGTTTATGGCCTGGTTCAGGACCAAGGAGAGAAGTGTGAATACATGCCTCTTGAGCTA
TAGAATGAGACGCTGGAGTGAGTAAGATGATTTTTTAAAAGTATTGTTTTATAAACAAAAATAA
GATTGTGACAAGGGATTCCACTATTAATGTTTTCATGCCTGTGCCTTAATCTGACTGGGTATGG
TGAGAATTGTGCTTGCAGCTTTAAGGTAAGAATTTTACCATCTTAATATGTTAAGAAGTGCCAT
TTCAGTCTCTCATCTCTACTCCAACTTGTCTTCTTAGGTGCTAAAGTCAGAGCCGAAATCTACG
AGGCCTTCGAGAACATCTACCCCATCCTGAAGGGCTTCAGAAAGACCACCGGAAGCGGAGCTAC
TAACTTCAGCCTGCTGAAGCAGGCTGGAGACGTGGAGGAGAACCCTGGACCTATGGTGAGCAAG
GGCGAGGAGCTGTTCACCGGGGTGGTGCCCATCCTGGTCGAGCTGGACGGCGACGTAAACGGCC
ACAAGTTCAGCGTGTCCGGCGAGGGCGAGGGCGATGCCACCTACGGCAAGCTGACCCTGAAGTT
CATCTGCACCACCGGCAAGCTGCCCGTGCCCTGGCCCACCCTCGTGACCACCCTGACCTACGGC
GTGCAGTGCTTCAGCCGCTACCCCGACCACATGAAGCAGCACGACTTCTTCAAGTCCGCCATGC
CCGAAGGCTACGTCCAGGAGCGCACCATCTTCTTCAAGGACGACGGCAACTACAAGACCCGCGC
CGAGGTGAAGTTCGAGGGCGACACCCTGGTGAACCGCATCGAGCTGAAGGGCATCGACTTCAAG
GAGGACGGCAACATCCTGGGGCACAAGCTGGAGTACAACTACAACAGCCACAACGTCTATATCA
TGGCCGACAAGCAGAAGAACGGCATCAAGGTGAACTTCAAGATCCGCCACAACATCGAGGACGG
CAGCGTGCAGCTCGCCGACCACTACCAGCAGAACACCCCCATCGGCGACGGCCCCGTGCTGCTG
CCCGACAACCACTACCTGAGCACCCAGTCCGCCCTGAGCAAAGACCCCAACGAGAAGCGCGATC
ACATGGTCCTGCTGGAGTTCGTGACCGCCGCCGGGATCACTCTCGGCATGGACGAGCTGTACAA
GTGAGCGGCCGCGTCGAGTCTAGAGGGCCCGTTTAAACCCGCTGATCAGCCTCGACTGTGCCTT
CTAGTTGCCAGCCATCTGTTGTTTGCCCCTCCCCCGTGCCTTCCTTGACCCTGGAAGGTGCCAC
TCCCACTGTCCTTTCCTAATAAAATGAGGAAATTGCATCGCATTGTCTGAGTAGGTGTCATTCT
ATTCTGGGGGGTGGGGTGGGGCAGGACAGCAAGGGGGAGGATTGGGAAGACAATAGCAGGCATG
CTGGGGATGCGGTGGGCTCTATGGCAGAAATTTATGAAGCATTTGAAAACATCTACCCTATTCT
AAAGGGATTCAGGAAGACGACGTAATGGCTCTCATGTACCCTTGCCTCCCCCACCCCCTTCTTT
TTTTTTTTTTAAAGAAATCAGTTTGTTTTGGTACCTTTAAATGGTGGTGTTGTGAGAAGATGGA
TGTTGAGTTGCAGGGTGTGGCACCAGGTGATGCCCTTCTGTAAGTGCCCACCGCGGGATGCCGG
GAAGGGGCATTATTTGTGCACTGAGAACACCGCGCAGCGTGACTGTGAGTTGCTCATACCGTGC
TGCTATCTGGGCAGCGCTGCCCATTTATTTATATGTAGATTTTAAACACTGCTGTTGACAAGTT
GGTTTGAGGGAGAAAACTTTAAGTGTTAAAGCCACCTCTATAATTGATTGGACTTTTTAATTTT
AATGTTTTTCCCCATGAACCACAGTTTTTATATTTCTACCAGAAAAGTAAAAATCTTTTTTAAA
AGTGTTGTTTTT
exemplary donor template for insertion at TBP locus
SEQ ID NO: 49
CTGACCACAGCTCTGCAAGCAGACTTCCATTTACAGTGAGGAGGTGAGCATTGCATTGAACAAA
AGATGGCGTTTTCACTTGGAATTAGTTATCTGAAGCTTTAGGATTCCTCAGCAATATGATTATG
AGACAAGAAAGGAAGATTCAGAAATGAGTCTAGTTGAAGGCAGCAATTCAGAGAAGAAGATTCA
GTTGTTATCATTGCCGTCCTGCTTGGTTTATGGCCTGGTTCAGGACCAAGGAGAGAAGTGTGAA
TACATGCCTCTTGAGCTATAGAATGAGACGCTGGAGTCACTAAGATGATTTTTTAAAAGTATTG
TTTTATAAACAAAAATAAGATTGTGACAAGGGATTCCACTATTAATGTTTTCATGCCTGTGCCT
TAATCTGACTGGGTATGGTGAGAATTGTGCTTGCAGCTTTAAGGTAAGAATTTTACCATCTTAA
TATGTTAAGAAGTGCCATTTCAGTCTCTCATCTCTACTCCAACTTGTCTTCTTAGGGGCTAAAG
TGCGGGCCGAGATCTACGAGGCCTTCGAGAATATCTACCCCATCCTGAAGGGCTTCAGAAAGAC
CACCGGAAGCGGAGCTACTAACTTCAGCCTGCTGAAGCAGGCTGGAGACGTGGAGGAGAACCCT
GGACCTATGGTGAGCAAGGGCGAGGAGCTGTTCACCGGGGTGGTGCCCATCCTGGTCGAGCTGG
ACGGCGACGTAAACGGCCACAAGTTCAGCGTGTCCGGCGAGGGCGAGGGCGATGCCACCTACGG
CAAGCTGACCCTGAAGTTCATCTGCACCACCGGCAAGCTGCCCGTGCCCTGGCCCACCCTCGTG
ACCACCCTGACCTACGGCGTGCAGTGCTTCAGCCGCTACCCCGACCACATGAAGCAGCACGACT
TCTTCAAGTCCGCCATGCCCGAAGGCTACGTCCAGGAGCGCACCATCTTCTTCAAGGACGACGG
CAACTACAAGACCCGCGCCGAGGTGAAGTTCGAGGGCGACACCCTGGTGAACCGCATCGAGCTG
AAGGGCATCGACTTCAAGGAGGACGGCAACATCCTGGGGCACAAGCTGGAGTACAACTACAACA
GCCACAACGTCTATATCATGGCCGACAAGCAGAAGAACGGCATCAAGGTGAACTTCAAGATCCG
CCACAACATCGAGGACGGCAGCGTGCAGCTCGCCGACCACTACCAGCAGAACACCCCCATCGGC
GACGGCCCCGTGCTGCTGCCCGACAACCACTACCTGAGCACCCAGTCCGCCCTGAGCAAAGACC
CCAACGAGAAGCGCGATCACATGGTCCTGCTGGAGTTCGTGACCGCCGCCGGGATCACTCTCGG
CATGGACGAGCTGTACAAGTGAGCGGCCGCGTCGAGTCTAGAGGGCCCGTTTAAACCCGCTGAT
CAGCCTCGACTGTGCCTTCTAGTTGCCAGCCATCTGTTGTTTGCCCCTCCCCCGTGCCTTCCTT
GACCCTGGAAGGTGCCACTCCCACTGTCCTTTCCTAATAAAATGAGGAAATTGCATCGCATTGT
CTGAGTAGGTGTCATTCTATTCTGGGGGGTGGGGTGGGGCAGGACAGCAAGGGGGAGGATTGGG
AAGACAATAGCAGGCATGCTGGGGATGCGGTGGGCTCTATGGTAGGTGCTAAAGTCAGAGCAGA
AATTTATGAAGCATTTGAAAACATCTACCCTATTCTAAAGGGATTCAGGAAGACGACGTAATGG
CTCTCATGTACCCTTGCCTCCCCCACCCCCTTCTTTTTTTTTTTTTAAACAAATCAGTTTGTTT
TGGTACCTTTAAATGGTGGTGTTGTGAGAAGATGGATGTTGAGTTGCAGGGTGTGGCACCAGGT
GATGCCCTTCTGTAAGTGCCCACCGCGGGATGCCGGGAAGGGGCATTATTTGTGCACTGAGAAC
ACCGCGCAGCGTGACTGTGAGTTGCTCATACCGTGCTGCTATCTGGGCAGCGCTGCCCATTTAT
TTATATGTAGATTTTAAACACTGCTGTTGAGAAGTTGGTTTGAGGGAGAAAACTTTAAGTGTTA
AAGCCACCTCTATAATTGATTGGACTTTTTAATTTTAATGTTTTTCCCCATGAACCACAGTTTT
TATATTTCTACCAGAAAAGTAAAAATCTTT
exemplary donor template for insertion at TBP locus
SEQ ID NO: 50
ACAAAAGATGGCGTTTTCACTTGGAATTAGTTATCTGAAGCTTTAGGATTCCTCAGCAATATGA
TTATGAGACAAGAAAGGAAGATTCAGAAATGAGTCTAGTTGAAGGCAGCAATTCAGAGAAGAAG
ATTCAGTTGTTATCATTGCCGTCCTGCTTGGTTTATGGCCTGGTTCAGGACCAAGGAGAGAAGT
GTGAATACATGCCTCTTGAGCTATAGAATGAGACGCTGGAGTCACTAAGATGATTTTTTAAAAG
TATTGTTTTATAAACAAAAATAAGATTGTGACAAGGGATTCCACTATTAATGTTTTCATGCCTG
TGCCTTAATCTGACTGGGTATGGTGAGAATTGTGCTTGCAGCTTTAAGGTAAGAATTTTACCAT
CTTAATATGTTAAGAAGTGCCATTTCAGTCTCTCATCTCTACTCCAACTTGTCTTCTTAGGTGC
TAAAGTCAGAGCAGAAATTTATGAAGCATTCGAGAACATCTACCCTATTCTAAAGGGATTCAGG
AAGACGACGGGAAGCGGAGCTACTAACTTCAGCCTGCTGAAGCAGGCTGGAGACGTGGAGGAGA
ACCCTGGACCTATGGTGAGCAAGGGCGAGGAGCTGTTCACCGGGGTGGTGCCCATCCTGGTCGA
GCTGGACGGCGACGTAAACGGCCACAAGTTCAGCGTGTCCGGCGAGGGCGAGGGCGATGCCACC
TACGGCAAGCTGACCCTGAAGTTCATCTGCACCACCGGCAAGCTGCCCGTGCCCTGGCCCACCC
TCGTGACCACCCTGACCTACGGCGTGCAGTGCTTCAGCCGCTACCCCGACCACATGAAGCAGCA
CGACTTCTTCAAGTCCGCCATGCCCGAAGGCTACGTCCAGGAGCGCACCATCTTCTTCAAGGAC
GACGGCAACTACAAGACCCGCGCCGAGGTGAAGTTCGAGGGCGACACCCTGGTGAACCGCATCG
AGCTGAAGGGCATCGACTTCAAGGAGGACGGCAACATCCTGGGGCACAAGCTGGAGTACAACTA
CAACAGCCACAACGTCTATATCATGGCCGACAAGCAGAAGAACGGCATCAAGGTGAACTTCAAG
ATCCGCCACAACATCGAGGACGGCAGCGTGCAGCTCGCCGACCACTACCAGCAGAACACCCCCA
TCGGCGACGGCCCCGTGCTGCTGCCCGACAACCACTACCTGAGCACCCAGTCCGCCCTGAGCAA
AGACCCCAACGAGAAGCGCGATCACATGGTCCTGCTGGAGTTCGTGACCGCCGCCGGGATCACT
CTCGGCATGGACGAGCTGTACAAGTGAGCGGCCGCGTCGAGTCTAGAGGGCCCGTTTAAACCCG
CTGATCAGCCTCGACTGTGCCTTCTAGTTGCCAGCCATCTGTTGTTTGCCCCTCCCCCGTGCCT
TCCTTGACCCTGGAAGGTGCCACTCCCACTGTCCTTTCCTAATAAAATGAGGAAATTGCATCGC
ATTGTCTGAGTAGGTGTCATTCTATTCTGGGGGGTGGGGTGGGGCAGGACAGCAAGGGGGAGGA
TTGGGAAGACAATAGCAGGCATGCTGGGGATGCGGTGGGCTCTATGGAAGGGATTCAGGAAGAC
GACGTAATGGCTCTCATGTACCCTTGCCTCCCCCACCCCCTTCTTTTTTTTTTTTTAAACAAAT
CAGTTTGTTTTGGTACCTTTAAATGGTGGTGTTGTGAGAAGATGGATGTTGAGTTGCAGGGTGT
GGCACCAGGTGATGCCCTTCTGTAAGTGCCCACCGCGGGATGCCGGGAAGGGGCATTATTTGTG
CACTGAGAACACCGCGCAGCGTGACTGTGAGTTGCTCATACCGTGCTGCTATCTGGGCAGCGCT
GCCCATTTATTTATATGTAGATTTTAAACACTGCTGTTGACAAGTTGGTTTGAGGGAGAAAACT
TTAAGTGTTAAAGCCACCTCTATAATTGATTGGACTTTTTAATTTTAATGTTTTTCCCCATGAA
CCACAGTTTTTATATTTCTACCAGAAAAGTAAAAATCTTTTTTAAAAGTGTTGTTTTTCTAATT
TATAACTCCTAGGGGTTATTTCTGTGCCAGACACA
exemplary donor template for insertion at G6PD locus
SEQ ID NO: 51
GGCCCGGGGGACTCCACATGGTGGCAGGCAGTGGCATCAGCAAGACACTCTCTCCCTCACAGAA
CGTGAAGCTCCCTGACGCCTATGAGCGCCTCATCCTGGACGTCTTCTGCGGGAGCCAGATGCAC
TTCGTGCGCAGGTGAGGCCCAGCTGCCGGCCCCTGCATACCTGTGGGCTATGGGGTGGCCTTTG
CCCTCCCTCCCTGTGTGCCACCGGCCTCCCAAGCCATACCATGTCCCCTCAGCGACGAGCTCCG
TGAGGCCTGGCGTATTTTCACCCCACTGCTGCACCAGATTGAGCTGGAGAAGCCCAAGCCCATC
CCCTATATTTATGGCAGGTGAGGAAAGGGTGGGGGCTGGGGACAGAGCCCAGCGGGCAGGGGCG
GGGTGAGGGTGGAGCTACCTCATGCCTCTCCTCCACCCGTCACTCTCCAGCCGAGGCCCCACGG
AGGCAGACGAGCTGATGAAGAGAGTGGGCTTCCAGTACGAGGGAACCTACAAATGGGTCAACCC
TCACAAGCTGGGAAGCGGAGCTACTAACTTCAGCCTGCTGAAGCAGGCTGGAGACGTGGAGGAG
AACCCTGGACCTATGGTGAGCAAGGGCGAGGAGCTGTTCACCGGGGTGGTGCCCATCCTGGTCG
AGCTGGACGGCGACGTAAACGGCCACAAGTTCAGCGTGTCCGGCGAGGGCGAGGGCGATGCCAC
CTACGGCAAGCTGACCCTGAAGTTCATCTGCACCACCGGCAAGCTGCCCGTGCCCTGGCCCACC
CTCGTGACCACCCTGACCTACGGCGTGCAGTGCTTCAGCCGCTACCCCGACCACATGAAGCAGC
ACGACTTCTTCAAGTCCGCCATGCCCGAAGGCTACGTCCAGGAGCGCACCATCTTCTTCAAGGA
CGACGGCAACTACAAGACCCGCGCCGAGGTGAAGTTCGAGGGCGACACCCTGGTGAACCGCATC
GAGCTGAAGGGCATCGACTTCAAGGAGGACGGCAACATCCTGGGGCACAAGCTGGAGTACAACT
ACAACAGCCACAACGTCTATATCATGGCCGACAAGCAGAAGAACGGCATCAAGGTGAACTTCAA
GATCCGCCACAACATCGAGGACGGCAGCGTGCAGCTCGCCGACCACTACCAGCAGAACACCCCC
ATCGGCGACGGCCCCGTGCTGCTGCCCGACAACCACTACCTGAGCACCCAGTCCGCCCTGAGCA
AAGACCCCAACGAGAAGCGCGATCACATGGTCCTGCTGGAGTTCGTGACCGCCGCCGGGATCAC
TCTCGGCATGGACGAGCTGTACAAGTGAGCGGCCGCGTCGAGTCTAGAGGGCCCGTTTAAACCC
GCTGATCAGCCTCGACTGTGCCTTCTAGTTGCCAGCCATCTGTTGTTTGCCCCTCCCCCGTGCC
TTCCTTGACCCTGGAAGGTGCCACTCCCACTGTCCTTTCCTAATAAAATGAGGAAATTGCATCG
CATTGTCTGAGTAGGTGTCATTCTATTCTGGGGGGTGGGGTGGGGCAGGACAGCAAGGGGGAGG
ATTGGGAAGACAATAGCAGGCATGCTGGGGATGCGGTGGGCTCTATGGGTGGGTGAACCCCCAC
AAGCTCTGAGCCCTGGGCACCCACCTCCACCCCCGCCACGGCCACCCTCCTTCCCGCCGCCCGA
CCCCGAGTCGGGAGGACTCCGGGACCATTGACCTCAGCTGCACATTCCTGGCCCCGGGCTCTGG
CCACCCTGGCCCGCCCCTCGCTGCTGCTACTACCCGAGCCCAGCTACATTCCTCAGCTGCCAAG
CACTCGAGACCATCCTGGCCCCTCCAGACCCTGCCTGAGCCCAGGAGCTGAGTCACCTCCTCCA
CTCACTCCAGCCCAACAGAAGGAAGGAGGAGGGCGCCCATTCGTCTGTCCCAGAGCTTATTGGC
CACTGGGTCTCACTCCTGAGTGGGGCCAGGGTGGGAGGGAGGGACGAGGGGGAGGAAAGGGGCG
AGCACCCACGTGAGAGAATCTGCCTGTGGCCTTGCCCGCCAGCCTCAGTGCCACTTGACATTCC
TTGTCACCAGCAACATCTCGAGCCCCCTGGATGTCC
exemplary donor template for insertion at E2F4 locus
SEQ ID NO: 52
CCAGGGGGCTGTAGTGGGGCCAGGCTGGACCTCTGTGCCCTGAGCATGGCTTTCTTGTTTTTCA
GTTTTGGAACTCCCCAAAGAGCTGTCAGAAATCTTTGATCCCACACGAGGTAGGCTGCTGCATT
CCTCCCTGAGGCTAGGGGTAAGGGACACAGCTCATTGGGTCCTATGGCTGTTTTCTTGCCCTTT
TGAGGACCTTGTTGTGGCGCTTATGGTAACTGGGGCAAAGGGTGAAGTTCCTGATGGGCAGGTG
GGGTTCCCTTTCCTGGGCTTTGGTGGGTGGAGAGGTGGGAGCTGGAATGTTAGTAACTGAGCTC
CCTCCATTCCCAGAGTGCATGAGCTCGGAGCTGCTGGAGGAGTTGATGTCCTCAGAAGGTGGGT
GGCCCTGGAAGGTGGGAGTGGGTGTGGGCAGGGGTTGGGCTGCTGCTAGGGGAGCCCTGGCCCA
GGGCCTGAGACTAGTGCTCTCTGCAGTGTTCGCCCCTCTGCTGAGACTTTCTCCTCCTCCTGGC
GACCACGACTACATCTACAACCTGGACGAGAGCGAGGGCGTGTGCGACCTGTTTGATGTGCCCG
TGCTGAACCTGGGAAGCGGAGCTACTAACTTCAGCCTGCTGAAGCAGGCTGGAGACGTGGAGGA
GAACCCTGGACCTATGGTGAGCAAGGGCGAGGAGCTGTTCACCGGGGTGGTGCCCATCCTGGTC
GAGCTGGACGGCGACGTAAACGGCCACAAGTTCAGCGTGTCCGGCGAGGGCGAGGGCGATGCCA
CCTACGGCAAGCTGACCCTGAAGTTCATCTGCACCACCGGCAAGCTGCCCGTGCCCTGGCCCAC
CCTCGTGACCACCCTGACCTACGGCGTGCAGTGCTTCAGCCGCTACCCCGACCACATGAAGCAG
CACGACTTCTTCAAGTCCGCCATGCCCGAAGGCTACGTCCAGGAGCGCACCATCTTCTTCAAGG
ACGACGGCAACTACAAGACCCGCGCCGAGGTGAAGTTCGAGGGCGACACCCTGGTGAACCGCAT
CGAGCTGAAGGGCATCGACTTCAAGGAGGACGGCAACATCCTGGGGCACAAGCTGGAGTACAAC
TACAACAGCCACAACGTCTATATCATGGCCGACAAGCAGAAGAACGGCATCAAGGTGAACTTCA
AGATCCGCCACAACATCGAGGACGGCAGCGTGCAGCTCGCCGACCACTACCAGCAGAACACCCC
CATCGGCGACGGCCCCGTGCTGCTGCCCGACAACCACTACCTGAGCACCCAGTCCGCCCTGAGC
AAAGACCCCAACGAGAAGCGCGATCACATGGTCCTGCTGGAGTTCGTGACCGCCGCCGGGATCA
CTCTCGGCATGGACGAGCTGTACAAGTGAGCGGCCGCGTCGAGTCTAGAGGGCCCGTTTAAACC
CGCTGATCAGCCTCGACTGTGCCTTCTAGTTGCCAGCCATCTGTTGTTTGCCCCTCCCCCGTGC
CTTCCTTGACCCTGGAAGGTGCCACTCCCACTGTCCTTTCCTAATAAAATGAGGAAATTGCATC
GCATTGTCTGAGTAGGTGTCATTCTATTCTGGGGGGTGGGGTGGGGCAGGACAGCAAGGGGGAG
GATTGGGAAGACAATAGCAGGCATGCTGGGGATGCGGTGGGCTCTATGGCCACCCCCGGGAGAC
CACGATTATATCTACAACCTGGACGAGAGTGAAGGTGTCTGTGACCTCTTTGATGTGCCTGTTC
TCAACCTCTGACTGACAGGGACATGCCCTGTGTGGCTGGGACCCAGACTGTCTGACCTGGGGGT
TGCCTGGGGACCTCTCCCACCCGACCCCTACAGAGCTTGAGAGCCACAGACGCCTGGCTTCTCC
GGCCTCCCCTCACCGCACAGTTCTGGCCACAGCTCCCGCTCCTGTGCTGGCACTTCTGTGCTCG
CAGAGCAGGGGAACAGGACTCAGCCCCCATCACCGTGGAGCCAAAGTGTTTGCTTCTCCCTTTC
TGCGGCCTTCGCCAGCCCAGGCTCGGCTGCCACCCAGTGGCACAGAACCGAGGAGCTGCCATTA
CCCCCCATAGGGGGCAGTGTCTTGTTCCTGCCAGCCTCAGTGTCTTGCTTCTGCCAGCTCCTTC
CCCTAGGAGGGAAGGGTGGGGTGGAACTGGGCACATG
exemplary donor template for insertion at E2F4 locus
SEQ ID NO: 53
CCAGGCTGGACCTCTGTGCCCTGAGCATGGCTTTCTTGTTTTTCAGTTTTGGAACTCCCCAAAG
AGCTGTCAGAAATCTTTGATCCCACACGAGGTAGGCTGCTGCATTCCTCCCTGAGGCTAGGGGT
AAGGGACACAGCTCATTGGGTCCTATGGCTGTTTTCTTGCCCTTTTGAGGACCTTGTTGTGGCG
CTTATGGTAACTGGGGCAAAGGGTGAAGTTCCTGATGGGCAGGTGGGGTTCCCTTTCCTGGGCT
TTGGTGGGTGGAGAGGTGGGAGCTGGAATGTTAGTAACTGAGCTCCCTCCATTCCCAGAGTGCA
TGAGCTCGGAGCTGCTGGAGGAGTTGATGTCCTCAGAAGGTGGGTGGCCCTGGAAGGTGGGAGT
GGGTGTGGGCAGGGGTTGGGCTGCTGCTAGGGGAGCCCTGGCCCAGGGCCTGAGACTAGTGCTC
TCTGCAGTGTTTGCCCCTCTGCTTCGTCTTAGTCCTCCTCCGGGCGACCACGACTACATCTACA
ACCTGGACGAGAGCGAGGGCGTGTGCGACCTGTTTGATGTGCCCGTGCTGAACCTGGGAAGCGG
AGCTACTAACTTCAGCCTGCTGAAGCAGGCTGGAGACGTGGAGGAGAACCCTGGACCTATGGTG
AGCAAGGGCGAGGAGCTGTTCACCGGGGTGGTGCCCATCCTGGTCGAGCTGGACGGCGACGTAA
ACGGCCACAAGTTCAGCGTGTCCGGCGAGGGCGAGGGCGATGCCACCTACGGCAAGCTGACCCT
GAAGTTCATCTGCACCACCGGCAAGCTGCCCGTGCCCTGGCCCACCCTCGTGACCACCCTGACC
TACGGCGTGCAGTGCTTCAGCCGCTACCCCGACCACATGAAGCAGCACGACTTCTTCAAGTCCG
CCATGCCCGAAGGCTACGTCCAGGAGCGCACCATCTTCTTCAAGGACGACGGCAACTACAAGAC
CCGCGCCGAGGTGAAGTTCGAGGGCGACACCCTGGTGAACCGCATCGAGCTGAAGGGCATCGAC
TTCAAGGAGGACGGCAACATCCTGGGGCACAAGCTGGAGTACAACTACAACAGCCACAACGTCT
ATATCATGGCCGACAAGCAGAAGAACGGCATCAAGGTGAACTTCAAGATCCGCCACAACATCGA
GGACGGCAGCGTGCAGCTCGCCGACCACTACCAGCAGAACACCCCCATCGGCGACGGCCCCGTG
CTGCTGCCCGACAACCACTACCTGAGCACCCAGTCCGCCCTGAGCAAAGACCCCAACGAGAAGC
GCGATCACATGGTCCTGCTGGAGTTCGTGACCGCCGCCGGGATCACTCTCGGCATGGACGAGCT
GTACAAGTGAGCGGCCGCGTCGAGTCTAGAGGGCCCGTTTAAACCCGCTGATCAGCCTCGACTG
TGCCTTCTAGTTGCCAGCCATCTGTTGTTTGCCCCTCCCCCGTGCCTTCCTTGACCCTGGAAGG
TGCCACTCCCACTGTCCTTTCCTAATAAAATGAGGAAATTGCATCGCATTGTCTGAGTAGGTGT
CATTCTATTCTGGGGGGTGGGGTGGGGCAGGACAGCAAGGGGGAGGATTGGGAAGACAATAGCA
GGCATGCTGGGGATGCGGTGGGCTCTATGGATTATATCTACAACCTGGACGAGAGTGAAGGTGT
CTGTGACCTCTTTGATGTGCCTGTTCTCAACCTCTGACTGACAGGGACATGCCCTGTGTGGCTG
GGACCCAGACTGTCTGACCTGGGGGTTGCCTGGGGACCTCTCCCACCCGACCCCTACAGAGCTT
GAGAGCCACAGACGCCTGGCTTCTCCGGCCTCCCCTCACCGCACAGTTCTGGCCACAGCTCCCG
CTCCTGTGCTGGCACTTCTGTGCTCGCAGAGCAGGGGAACAGGACTCAGCCCCCATCACCGTGG
AGCCAAAGTGTTTGCTTCTCCCTTTCTGCGGCCTTCGCCAGCCCAGGCTCGGCTGCCACCCAGT
GGCACAGAACCGAGGAGCTGCCATTACCCCCCATAGGGGGCAGTGTCTTGTTCCTGCCAGCCTC
AGTGTCTTGCTTCTGCCAGCTCCTTCCCCTAGGAGGGAAGGGTGGGGTGGAACTGGGCACATGC
CAGCACCACTTGTAGCTT
exemplary donor template for insertion at E2F4 locus
SEQ ID NO: 54
GTCAGAAATCTTTGATCCCACACGAGGTAGGCTGCTGCATTCCTCCCTGAGGCTAGGGGTAAGG
GACACAGCTCATTGGGTCCTATGGCTGTTTTCTTGCCCTTTTGAGGACCTTGTTGTGGCGCTTA
TGGTAACTGGGGCAAAGGGTGAAGTTCCTGATGGGCAGGTGGGGTTCCCTTTCCTGGGCTTTGG
TGGGTGGAGAGGTGGGAGCTGGAATGTTAGTAACTGAGCTCCCTCCATTCCCAGAGTGCATGAG
CTCGGAGCTGCTGGAGGAGTTGATGTCCTCAGAAGGTGGGTGGCCCTGGAAGGTGGGAGTGGGT
GTGGGCAGGGGTTGGGCTGCTGCTAGGGGAGCCCTGGCCCAGGGCCTGAGACTAGTGCTCTCTG
CAGTGTTTGCCCCTCTGCTTCGTCTTTCTCCACCCCCGGGAGACCACGATTATATCTACAACCT
GGACGAGAGTGAAGGTGTCTGTGACCTCTTCGACGTGCCCGTGCTCAACCTCGGAAGCGGAGCT
ACTAACTTCAGCCTGCTGAAGCAGGCTGGAGACGTGGAGGAGAACCCTGGACCTATGGTGAGCA
AGGGCGAGGAGCTGTTCACCGGGGTGGTGCCCATCCTGGTCGAGCTGGACGGCGACGTAAACGG
CCACAAGTTCAGCGTGTCCGGCGAGGGCGAGGGCGATGCCACCTACGGCAAGCTGACCCTGAAG
TTCATCTGCACCACCGGCAAGCTGCCCGTGCCCTGGCCCACCCTCGTGACCACCCTGACCTACG
GCGTGCAGTGCTTCAGCCGCTACCCCGACCACATGAAGCAGCACGACTTCTTCAAGTCCGCCAT
GCCCGAAGGCTACGTCCAGGAGCGCACCATCTTCTTCAAGGACGACGGCAACTACAAGACCCGC
GCCGAGGTGAAGTTCGAGGGCGACACCCTGGTGAACCGCATCGAGCTGAAGGGCATCGACTTCA
AGGAGGACGGCAACATCCTGGGGCACAAGCTGGAGTACAACTACAACAGCCACAACGTCTATAT
CATGGCCGACAAGCAGAAGAACGGCATCAAGGTGAACTTCAAGATCCGCCACAACATCGAGGAC
GGCAGCGTGCAGCTCGCCGACCACTACCAGCAGAACACCCCCATCGGCGACGGCCCCGTGCTGC
TGCCCGACAACCACTACCTGAGCACCCAGTCCGCCCTGAGCAAAGACCCCAACGAGAAGCGCGA
TCACATGGTCCTGCTGGAGTTCGTGACCGCCGCCGGGATCACTCTCGGCATGGACGAGCTGTAC
AAGTGAGCGGCCGCGTCGAGTCTAGAGGGCCCGTTTAAACCCGCTGATCAGCCTCGACTGTGCC
TTCTAGTTGCCAGCCATCTGTTGTTTGCCCCTCCCCCGTGCCTTCCTTGACCCTGGAAGGTGCC
ACTCCCACTGTCCTTTCCTAATAAAATGAGGAAATTGCATCGCATTGTCTGAGTAGGTGTCATT
CTATTCTGGGGGGTGGGGTGGGGCAGGACAGCAAGGGGGAGGATTGGGAAGACAATAGCAGGCA
TGCTGGGGATGCGGTGGGCTCTATGGTGACTGACAGGGACATGCCCTGTGTGGCTGGGACCCAG
ACTGTCTGACCTGGGGGTTGCCTGGGGACCTCTCCCACCCGACCCCTACAGAGCTTGAGAGCCA
CAGACGCCTGGCTTCTCCGGCCTCCCCTCACCGCACAGTTCTGGCCACAGCTCCCGCTCCTGTG
CTGGCACTTCTGTGCTCGCAGAGCAGGGGAACAGGACTCAGCCCCCATCACCGTGGAGCCAAAG
TGTTTGCTTCTCCCTTTCTGCGGCCTTCGCCAGCCCAGGCTCGGCTGCCACCCAGTGGCACAGA
ACCGAGGAGCTGCCATTACCCCCCATAGGGGGCAGTGTCTTGTTCCTGCCAGCCTCAGTGTCTT
GCTTCTGCCAGCTCCTTCCCCTAGGAGGGAAGGGTGGGGTGGAACTGGGCACATGCCAGCACCA
CTTCTAGCTTCCTTCGCTATCCCCCACCCCCTGACCCTCCAGCTCCTCCTGGCCCTCTCACGTG
CCCACTTCTGCTGG
exemplary donor template for insertion at KIF11 locus
SEQ ID NO: 55
AGAGCAGGGTTTCTTGACAGCAGTGCTATTGGCATTTTAAACTGGATAATTCTTTGTTGTGATG
GGCTTTCCTGTGGAGTGTACTATGTTGGTACACAAGAAAAACAGTGTACTATGTGAATACTCAC
TCAAAGCCAGTAGCACTCCCTGATTGTAACACCAAAAAAGTCTCTCAGCATTGCCAAATGTCCC
CTGTGGCAGCAGAATCACTCCCTGATGAGAACCACTACCCTGGAGTAAAATCTATAACTATGTC
TTAGAAAATAACACAGAAAATTAATATTTCTTTCACTCTACTCCTTCCATTAGTGATCAAATAA
AGAAGGCATTTGGCGCTACTTGCCAAATTGTTGGCTCAAACTTGTGCTGAACCTTTTTTGGTTT
TCTACACTTAAGTTTTTTTGCCTATAACCCAGAGAACTTTGAAAATAGAGTGTAGTTAATGTGT
ATCTAATGTTACTTTGTATTGACTTAATTTACCGGCCTTTAATCCACAGCATAAGAAGTCCCAC
GGCAAGGACAAAGAGAACCGGGGCATCAACACACTGGAACGGTCCAAGGTCGAGGAAACAACCG
AGCACCTGGTCACCAAGAGCAGACTGCCTCTGAGAGCCCAGATCAACCTGGGAAGCGGAGCTAC
TAACTTCAGCCTGCTGAAGCAGGCTGGAGACGTGGAGGAGAACCCTGGACCTATGGTGAGCAAG
GGCGAGGAGCTGTTCACCGGGGTGGTGCCCATCCTGGTCGAGCTGGACGGCGACGTAAACGGCC
ACAAGTTCAGCGTGTCCGGCGAGGGCGAGGGCGATGCCACCTACGGCAAGCTGACCCTGAAGTT
CATCTGCACCACCGGCAAGCTGCCCGTGCCCTGGCCCACCCTCGTGACCACCCTGACCTACGGC
GTGCAGTGCTTCAGCCGCTACCCCGACCACATGAAGCAGCACGACTTCTTCAAGTCCGCCATGC
CCGAAGGCTACGTCCAGGAGCGCACCATCTTCTTCAAGGACGACGGCAACTACAAGACCCGCGC
CGAGGTGAAGTTCGAGGGCGACACCCTGGTGAACCGCATCGAGCTGAAGGGCATCGACTTCAAG
GAGGACGGCAACATCCTGGGGCACAAGCTGGAGTACAACTACAACAGCCACAACGTCTATATCA
TGGCCGACAAGCAGAAGAACGGCATCAAGGTGAACTTCAAGATCCGCCACAACATCGAGGACGG
CAGCGTGCAGCTCGCCGACCACTACCAGCAGAACACCCCCATCGGCGACGGCCCCGTGCTGCTG
CCCGACAACCACTACCTGAGCACCCAGTCCGCCCTGAGCAAAGACCCCAACGAGAAGCGCGATC
ACATGGTCCTGCTGGAGTTCGTGACCGCCGCCGGGATCACTCTCGGCATGGACGAGCTGTACAA
GTGAGCGGCCGCGTCGAGTCTAGAGGGCCCGTTTAAACCCGCTGATCAGCCTCGACTGTGCCTT
CTAGTTGCCAGCCATCTGTTGTTTGCCCCTCCCCCGTGCCTTCCTTGACCCTGGAAGGTGCCAC
TCCCACTGTCCTTTCCTAATAAAATGAGGAAATTGCATCGCATTGTCTGAGTAGGTGTCATTCT
ATTCTGGGGGGTGGGGTGGGGCAGGACAGCAAGGGGGAGGATTGGGAAGACAATAGCAGGCATG
CTGGGGATGCGGTGGGCTCTATGGAAAAAATCACATGGAAAAGACAAAGAAAACAGAGGCATTA
ACACACTGGAGAGGTCTAAAGTGGAAGAAACTACAGAGCACTTGGTTACAAAGAGCAGATTACC
TCTGCGAGCCCAGATCAACCTTTAATTCACTTGGGGGTTGGCAATTTTATTTTTAAAGAAAACT
TAAAAATAAAACCTGAAACCCCAGAACTTGAGCCTTGTGTATAGATTTTAAAAGAATATATATA
TCAGCCGGGCGCGGTGGCTCATGCCTGTAATCCCAGCACTTTGGGAGGCTGAGGCGGGTGGATT
GCTTGAGCCCAGGAGTTTGAGACCAGCCTGGCCAACGTGGCAAAACCTCGTCTCTGTTAAAAAT
TAGCCGGGCGTGGTGGCACACTCCTGTAATCCCAGCTACTGGGGAGGCTGAGGCACGAGAATCA
CTTGAACCCAGGAAGCGGGGTTGCAGTGAGCCAAAGGTACACCACTACACTCCAGCCTGGGCAA
CAGAGCAAGACT
exemplary donor template for insertion at KFF11 locus
SEQ ID NO: 56
TTCCTGTGGACTGTACTATGTTGGTACACAAGAAAAACAGTGTACTATGTGAATACTCACTCAA
AGCCAGTAGCACTCCCTGATTGTAACACCAAAAAAGTCTCTCAGCATTGCCAAATGTCCCCTGT
GGCAGCAGAATCACTCCCTGATGAGAACCACTACCCTGGAGTAAAATCTATAACTATGTCTTAG
AAAATAACACAGAAAATTAATATTTCTTTCACTCTACTCCTTCCATTAGTGATCAAATAAAGAA
GGCATTTGGCGCTACTTGCCAAATTGTTGGCTCAAACTTGTGCTGAACCTTTTTTGGTTTTCTA
CACTTAAGTTTTTTTGCCTATAACCCAGAGAACTTTGAAAATAGAGTGTAGTTAATGTGTATCT
AATGTTACTTTGTATTGACTTAATTTTCCCGCCTTAAATCCACAGCATAAAAAATCACATGGAA
AAGACAAAGAAAACAGAGGCATTAACACACTGGAGAGGTCTAAAGTGGAAGAAACAACCGAGCA
CCTGGTCACCAAGAGCAGACTGCCTCTGAGAGCCCAGATCAACCTGGGAAGCGGAGCTACTAAC
TTCAGCCTGCTGAAGCAGGCTGGAGACGTGGAGGAGAACCCTGGACCTATGGTGAGCAAGGGCG
AGGAGCTGTTCACCGGGGTGGTGCCCATCCTGGTCGAGCTGGACGGCGACGTAAACGGCCACAA
GTTCAGCGTGTCCGGCGAGGGCGAGGGCGATGCCACCTACGGCAAGCTGACCCTGAAGTTCATC
TGCACCACCGGCAAGCTGCCCGTGCCCTGGCCCACCCTCGTGACCACCCTGACCTACGGCGTGC
AGTGCTTCAGCCGCTACCCCGACCACATGAAGCAGCACGACTTCTTCAAGTCCGCCATGCCCGA
AGGCTACGTCCAGGAGCGCACCATCTTCTTCAAGGACGACGGCAACTACAAGACCCGCGCCGAG
GTGAAGTTCGAGGGCGACACCCTGGTGAACCGCATCGAGCTGAAGGGCATCGACTTCAAGGAGG
ACGGCAACATCCTGGGGCACAAGCTGGAGTACAACTACAACAGCCACAACGTCTATATCATGGC
CGACAAGCAGAAGAACGGCATCAAGGTGAACTTCAAGATCCGCCACAACATCGAGGACGGCAGC
GTGCAGCTCGCCGACCACTACCAGCAGAACACCCCCATCGGCGACGGCCCCGTGCTGCTGCCCG
ACAACCACTACCTGAGCACCCAGTCCGCCCTGAGCAAAGACCCCAACGAGAAGCGCGATCACAT
GGTCCTGCTGGAGTTCGTGACCGCCGCCGGGATCACTCTCGGCATGGACGAGCTGTACAAGTGA
GCGGCCGCGTCGAGTCTAGAGGGCCCGTTTAAACCCGCTGATCAGCCTCGACTGTGCCTTCTAG
TTGCCAGCCATCTGTTGTTTGCCCCTCCCCCGTGCCTTCCTTGACCCTGGAAGGTGCCACTCCC
ACTGTCCTTTCCTAATAAAATGAGGAAATTGCATCGCATTGTCTGAGTAGGTGTCATTCTATTC
TGGGGGGTGGGGTGGGGCAGGACAGCAAGGGGGAGGATTGGGAAGACAATAGCAGGCATGCTGG
GGATGCGGTGGGCTCTATGGAACTACAGAGCACTTGGCTACATAGAGCAGATTACCTCTGCGAG
CCCAGATCAACCTTTAATTCACTTGGGGGTTGGCAATTTTATTTTTAAAGAAAACTTAAAAATA
AAACCTGAAACCCCAGAACTTGAGCCTTGTGTATAGATTTTAAAAGAATATATATATCAGCCGG
GCGCGGTGGCTCATGCCTGTAATCCCAGCACTTTGGGAGGCTGAGGCGGGTGGATTGCTTGAGC
CCAGGAGTTTGAGACCAGCCTGGCCAACGTGGCAAAACCTCGTCTCTGTTAAAAATTAGCCGGG
CGTGGTGGCACACTCCTGTAATCCCAGCTACTGGGGAGGCTGAGGCACGAGAATCACTTGAACC
CAGGAAGCGGGGTTGCAGTGAGCCAAAGGTACACCACTACACTCCAGCCTGGGCAACAGAGCAA
GACTCGGTCTCAAAAACAAAATTTAAAAAAGATATAAGGCAGTACTGTAAATTCAGTTGAATTT
TGATATCT
exemplary donor template for insertion at at KFF11 locus
SEQ ID NO: 57
TTAAACTGGATAATTCTTTGTTGTGATGGGCTTTCCTGTGGACTGTACTATGTTGGTACACAAG
AAAAACAGTGTACTATGTGAATACTCACTCAAAGCCAGTAGCACTCCCTGATTGTAACACCAAA
AAAGTCTCTCAGCATTGCCAAATGTCCCCTGTGGCAGCAGAATCACTCCCTGATGAGAACCACT
ACCCTGGAGTAAAATCTATAACTATGTCTTAGAAAATAACACAGAAAATTAATATTTCTTTCAC
TCTACTCCTTCCATTAGTGATCAAATAAAGAAGGCATTTGGCGCTACTTGCCAAATTGTTGGCT
CAAACTTGTGCTGAACCTTTTTTGGTTTTCTACACTTAAGTTTTTTTGCCTATAACCCAGAGAA
CTTTGAAAATAGAGTGTAGTTAATGTGTATCTAATGTTACTTTGTATTGACTTAATTTTCCCGC
CTTAAATCCACAGCATAAAAAATCACATGGAAAAGACAAAGAAAACAGAGGCATCAACACACTG
GAACGGTCCAAGGTCGAGGAAACAACCGAGCACCTGGTCACCAAGAGCAGACTGCCTCTGAGAG
CCCAGATCAACCTGGGAAGCGGAGCTACTAACTTCAGCCTGCTGAAGCAGGCTGGAGACGTGGA
GGAGAACCCTGGACCTATGGTGAGCAAGGGCGAGGAGCTGTTCACCGGGGTGGTGCCCATCCTG
GTCGAGCTGGACGGCGACGTAAACGGCCACAAGTTCAGCGTGTCCGGCGAGGGCGAGGGCGATG
CCACCTACGGCAAGCTGACCCTGAAGTTCATCTGCACCACCGGCAAGCTGCCCGTGCCCTGGCC
CACCCTCGTGACCACCCTGACCTACGGCGTGCAGTGCTTCAGCCGCTACCCCGACCACATGAAG
CAGCACGACTTCTTCAAGTCCGCCATGCCCGAAGGCTACGTCCAGGAGCGCACCATCTTCTTCA
AGGACGACGGCAACTACAAGACCCGCGCCGAGGTGAAGTTCGAGGGCGACACCCTGGTGAACCG
CATCGAGCTGAAGGGCATCGACTTCAAGGAGGACGGCAACATCCTGGGGCACAAGCTGGAGTAC
AACTACAACAGCCACAACGTCTATATCATGGCCGACAAGCAGAAGAACGGCATCAAGGTGAACT
TCAAGATCCGCCACAACATCGAGGACGGCAGCGTGCAGCTCGCCGACCACTACCAGCAGAACAC
CCCCATCGGCGACGGCCCCGTGCTGCTGCCCGACAACCACTACCTGAGCACCCAGTCCGCCCTG
AGCAAAGACCCCAACGAGAAGCGCGATCACATGGTCCTGCTGGAGTTCGTGACCGCCGCCGGGA
TCACTCTCGGCATGGACGAGCTGTACAAGTGAGCGGCCGCGTCGAGTCTAGAGGGCCCGTTTAA
ACCCGCTGATCAGCCTCGACTGTGCCTTCTAGTTGCCAGCCATCTGTTGTTTGCCCCTCCCCCG
TGCCTTCCTTGACCCTGGAAGGTGCCACTCCCACTGTCCTTTCCTAATAAAATGAGGAAATTGC
ATCGCATTGTCTGAGTAGGTGTCATTCTATTCTGGGGGGTGGGGTGGGGCAGGACAGCAAGGGG
GAGGATTGGGAAGACAATAGCAGGCATGCTGGGGATGCGGTGGGCTCTATGGATTAACACACTG
GAGAGTTCTGAAGTGGAAGAAACTACAGAGCACTTGGTTACAAAGAGCAGATTACCTCTGCGAG
CCCAGATCAACCTTTAATTGAGTTGGGGGTTGGCAATTTTATTTTTAAAGAAAACTTAAAAATA
AAACCTGAAACCCCAGAACTTGAGCCTTGTGTATAGATTTTAAAAGAATATATATATGAGCCGG
GCGCGGTGGCTCATGCCTGTAATCCCAGCACTTTGGGAGGCTGAGGCGGGTGGATTGCTTGAGC
CCAGGAGTTTGAGACCAGCCTGGCCAACGTGGCAAAACCTCGTCTCTGTTAAAAATTAGCCGGG
CGTGGTGGCACACTCCTGTAATCCCAGCTACTGGGGAGGCTGAGGCACGAGAATCACTTGAACC
CAGGAAGCGGGGTTGCAGTGAGCCAAAGGTACACCACTACACTCCAGCCTGGGCAACAGAGCAA
GACTCGGTCTCAAAAACAAAATTTAAAAAAGATATAAGGC
exemplary donor template for insertion at GAPDH locus
SEQ ID NO: 48
GAAGACTGTGGATGGCCCCTCCGGGAAACTGTGGCGTGATGGCCGCGGGGCTCTCCAGAACATC
ATCCCTGCCTCTACTGGCGCTGCCAAGGCTGTGGGCAAGGTCATCCCTGAGCTGAACGGGAAGC
TCACTGGCATGGCCTTCCGTGTCCCCACTGCCAACGTGTCAGTGGTGGACCTGACCTGCCGTCT
AGAAAAACCTGCCAAATATGATGACATCAAGAAGGTGGTGAAGCAGGCGTCGGAGGGCCCCCTC
AAGGGCATCCTGGGCTACACTGAGCACCAGGTGGTCTCCTCTGACTTCAACAGCGACACCCACT
CCTCCACCTTTGACGCTGGGGCTGGCATTGCCCTCAACGACCACTTTGTCAAGCTCATTTCCTG
GTATGTGGCTGGGGCCAGAGACTGGCTCTTAAAAAGTGCAGGGTCTGGCGCCCTCTGGTGGCTG
GCTCAGAAAAAGGGCCCTGACAACTCTTTACATCTTCTAGGTATGACAACGAGTTCGGATATAG
CAATAGAGTGGTCGATCTGATGGCTCATATGGCTAGCAAAGAGGGAAGCGGAGCTACTAACTTC
AGCCTGCTGAAGCAGGCTGGAGACGTGGAGGAGAACCCTGGACCTATGTGGCCCCTGGTAGCGG
CGCTGTTGCTGGGCTCGGCGTGCTGCGGATCAGCTCAGCTACTATTTAATAAAACAAAATCTGT
AGAATTCACGTTTTGTAATGACACTGTCGTCATTCCATGCTTTGTTACTAATATGGAGGCACAA
AACACTACTGAAGTATACGTAAAGTGGAAATTTAAAGGAAGAGATATTTACACCTTTGATGGAG
CTCTAAACAAGTCCACTGTCCCCACTGACTTTAGTAGTGCAAAAATTGAAGTCTCACAATTACT
AAAAGGAGATGCCTCTTTGAAGATGGATAAGAGTGATGCTGTCTCACACACAGGAAACTACACT
TGTGAAGTAACAGAATTAACCAGAGAAGGTGAAACGATCATCGAGCTAAAATATCGTGTTGTTT
CATGGTTTTCTCCAAATGAAAATATTCTTATTGTTATTTTCCCAATTTTTGCTATACTCCTGTT
CTGGGGACAGTTTGGTATTAAAACACTTAAATATAGATCCGGTGGTATGGATGAGAAAACAATT
GCTTTACTTGTTGCTGGACTAGTGATCACTGTCATTGTCATTGTTGGAGCCATTCTTTTCGTCC
CAGGTGAATATTCATTAAAGAATGCTACTGGCCTTGGTTTAATTGTGACTTCTACAGGGATATT
AATATTACTTCACTACTATGTGTTTAGTACAGCGATTGGATTAACCTCCTTCGTCATTGCCATA
TTGGTTATTCAGGTGATAGCCTATATCCTCGCTGTGGTTGGACTGAGTCTCTGTATTGCGGCGT
GTATACCAATGCATGGCCCTCTTCTGATTTCAGGTTTGAGTATCTTAGCTCTAGCACAATTACT
TGGACTAGTTTATATGAAATTTGTGGCTTCCAATCAGAAGACTATACAACCTCCTAGGAAAGCT
GTAGAGGAACCCCTTAATGCATTCAAAGAATCAAAAGGAATGATGAATGATGAATGAGCGGCCG
CGTCGAGTCTAGAGGGCCCGTTTAAACCCGCTGATCAGCCTCGACTGTGCCTTCTAGTTGCCAG
CCATCTGTTGTTTGCCCCTCCCCCGTGCCTTCCTTGACCCTGGAAGGTGCCACTCCCACTGTCC
TTTCCTAATAAAATGAGGAAATTGCATCGCATTGTCTGAGTAGGTGTCATTCTATTCTGGGGGG
TGGGGTGGGGCAGGACAGCAAGGGGGAGGATTGGGAAGACAATAGCAGGCATGCTGGGGATGCG
GTGGGCTCTATGGATTTGGCTACAGCAACAGGGTGGTGGACCTCATGGCCCACATGGCCTCCAA
GGAGTAAGACCCCTGGACCACCAGCCCCAGCAAGAGCACAAGAGGAAGAGAGAGACCCTCACTG
CTGGGGAGTCCCTGCCACACTCAGTCCCCCACCACACTGAATCTCCCCTCCTCACAGTTGCCAT
GTAGACCCCTTGAAGAGGGGAGGGGCCTAGGGAGCCGCACCTTGTCATGTACCATCAATAAAGT
ACCCTGTGCTCAACCAGTTACTTGTCCTGTCTTATTCTAGGGTCTGGGGCAGAGGGGAGGGAAG
CTGGGCTTGTGTCAAGGTGAGACATTCTTGCTGGGGAGGGACCTGGTATGTTCTCCTCAGACTG
AGGGTAGGGCCTCCAAACAGCCTTGCTTGCTTCGAGAACCATTTGCTTCCCGCTCAGACGTCTT
GAGTGCTACAGGAAGCTGGCACCACTACTTCAGAGAACAAGGCCTTTTCCTCTCCTCGCTCCAG
T
exemplary donor template for insertion at GAPDH locus
SEQ ID NO: 205
GAAGACTGTGGATGGCCCCTCCGGGAAACTGTGGCGTGATGGCCGCGGGGCTCTCCAGAACATC
ATCCCTGCCTCTACTGGCGCTGCCAAGGCTGTGGGCAAGGTCATCCCTGAGCTGAACGGGAAGC
TCACTGGCATGGCCTTCCGTGTCCCCACTGCCAACGTGTCAGTGGTGGACCTGACCTGCCGTCT
AGAAAAACCTGCCAAATATGATGACATCAAGAAGGTGGTGAAGCAGGCGTCGGAGGGCCCCCTC
AAGGGCATCCTGGGCTACACTGAGCACCAGGTGGTCTCCTCTGACTTCAACAGCGACACCCACT
CCTCCACCTTTGACGCTGGGGCTGGCATTGCCCTCAACGACCACTTTGTCAAGCTCATTTCCTG
GTATGTGGCTGGGGCCAGAGACTGGCTCTTAAAAAGTGCAGGGTCTGGCGCCCTCTGGTGGCTG
GCTCAGAAAAAGGGCCCTGACAACTCTTTACATCTTCTAGGTATGACAACGAGTTCGGATATAG
CAATAGAGTGGTCGATCTGATGGCTCATATGGCTAGCAAAGAGGGAAGCGGAGCTACTAACTTC
AGCCTGCTGAAGCAGGCTGGAGACGTGGAGGAGAACCCTGGACCTATGTGGCAACTGCTGCTGC
CTACAGCTCTGCTGCTTCTGGTGTCTGCCGGCATGAGAACCGAGGATCTGCCTAAGGCCGTGGT
GTTCCTGGAACCTCAGTGGTACAGAGTGCTGGAAAAGGACAGCGTGACCCTGAAGTGCCAGGGC
GCCTATTCTCCCGAGGACAATAGCACCCAGTGGTTCCACAACGAGAGCCTGATCAGCAGCCAGG
CCAGCAGCTACTTTATCGATGCCGCCACCGTGGACGACAGCGGCGAGTACAGATGCCAGACCAA
TCTGAGCACCCTGAGCGACCCTGTGCAGCTGGAAGTGCACATTGGATGGTTGCTGCTGCAAGCC
CCTAGATGGGTGTTCAAAGAAGAGGACCCCATCCACCTGAGATGCCACTCTTGGAAGAACACAG
CCCTGCACAAAGTGACCTACCTGCAGAACGGCAAGGGCAGAAAGTACTTCCACCACAACAGCGA
CTTCTACATCCCCAAGGCCACACTGAAGGACTCCGGCTCCTACTTCTGCAGAGGCCTGGTCGGC
AGCAAGAACGTGTCCAGCGAGACAGTGAACATCACCATCACACAGGGCCTCGCCGTGTCTACCA
TCAGCAGCTTTTTCCCACCTGGCTATCAGGTGTCCTTCTGCCTGGTCATGGTGCTGCTGTTCGC
CGTGGATACCGGCCTGTACTTCAGCGTCAAGACCAACATCCGGTCCAGCACCAGAGACTGGAAG
GACCACAAGTTCAAGTGGCGGAAGGACCCTCAGGACAAGTAAGCGGCCGCGTCGAGTCTAGAGG
GCCCGTTTAAACCCGCTGATCAGCCTCGACTGTGCCTTCTAGTTGCCAGCCATCTGTTGTTTGC
CCCTCCCCCGTGCCTTCCTTGACCCTGGAAGGTGCCACTCCCACTGTCCTTTCCTAATAAAATG
AGGAAATTGCATCGCATTGTCTGAGTAGGTGTCATTCTATTCTGGGGGGTGGGGTGGGGCAGGA
CAGCAAGGGGGAGGATTGGGAAGACAATAGCAGGCATGCTGGGGATGCGGTGGGCTCTATGGAT
TTGGCTACAGCAACAGGGTGGTGGACCTCATGGCCCACATGGCCTCCAAGGAGTAAGACCCCTG
GACCACCAGCCCCAGCAAGAGCACAAGAGGAAGAGAGAGACCCTCACTGCTGGGGAGTCCCTGC
CACACTCAGTCCCCCACCACACTGAATCTCCCCTCCTCACAGTTGCCATGTAGACCCCTTGAAG
AGGGGAGGGGCCTAGGGAGCCGCACCTTGTCATGTACCATCAATAAAGTACCCTGTGCTCAACC
AGTTACTTGTCCTGTCTTATTCTAGGGTCTGGGGCAGAGGGGAGGGAAGCTGGGCTTGTGTCAA
GGTGAGACATTCTTGCTGGGGAGGGACCTGGTATGTTCTCCTCAGACTGAGGGTAGGGCCTCCA
AACAGCCTTGCTTGCTTCGAGAACCATTTGCTTCCCGCTCAGACGTCTTGAGTGCTACAGGAAG
CTGGCACCACTACTTCAGAGAACAAGGCCTTTTCCTCTCCTCGCTCCAGT
exemplary donor template for insertion at GAPDH locus
SEQ ID NO: 206
GTCGACGAAGACTGTGGATGGCCCCTCCGGGAAACTGTGGCGTGATGGCCGCGGGGCTCTCCAG
AACATCATCCCTGCCTCTACTGGCGCTGCCAAGGCTGTGGGCAAGGTCATCCCTGAGCTGAACG
GGAAGCTCACTGGCATGGCCTTCCGTGTCCCCACTGCCAACGTGTCAGTGGTGGACCTGACCTG
CCGTCTAGAAAAACCTGCCAAATATGATGACATCAAGAAGGTGGTGAAGCAGGCGTCGGAGGGC
CCCCTCAAGGGCATCCTGGGCTACACTGAGCACCAGGTGGTCTCCTCTGACTTCAACAGCGACA
CCCACTCCTCCACCTTTGACGCTGGGGCTGGCATTGCCCTCAACGACCACTTTGTCAAGCTCAT
TTCCTGGTATGTGGCTGGGGCCAGAGACTGGCTCTTAAAAAGTGCAGGGTCTGGCGCCCTCTGG
TGGCTGGCTCAGAAAAAGGGCCCTGACAACTCTTTACATCTTCTAGGTATGACAACGAGTTCGG
ATATAGCAATAGAGTGGTCGATCTGATGGCTCATATGGCTAGCAAAGAGGGAAGCGGAGCTACT
AACTTCAGCCTGCTGAAGCAGGCTGGAGACGTGGAGGAGAACCCTGGACCTATGCTTCTCCTGG
TGACAAGCCTTCTGCTCTGTGAGTTACCACACCCAGCATTCCTCCTGATCCCAGACATCCAGAT
GACACAGACTACATCCTCCCTGTCTGCCTCTCTGGGAGACAGAGTCACCATCAGTTGCAGGGCA
AGTGAGGACATTAGTAAATATTTAAATTGGTATGAGCAGAAACCAGATGGAACTGTTAAACTCC
TGATCTACCATACATCAAGATTACACTCAGGAGTCCCATCAAGGTTCAGTGGCAGTGGGTCTGG
AACAGATTATTCTCTCACCATTAGCAACCTGGAGCAAGAAGATATTGCCACTTAGTTTTGCCAA
CAGGGTAATACGCTTCCGTACACGTTCGGAGGGGGGACTAAGTTGGAAATAACAGGCTCCACCT
CTGGATCCGGCAAGCCCGGATCTGGCGAGGGATCCACCAAGGGCGAGGTGAAACTGCAGGAGTC
AGGACCTGGCCTGGTGGCGCCCTCACAGAGCCTGTCCGTCACATGCACTGTCTCAGGGGTCTCA
TTACCCGACTATGGTGTAAGCTGGATTCGCCAGCCTCCACGAAAGGGTCTGGAGTGGCTGGGAG
TAATATGGGGTAGTGAAACCACATACTATAATTCAGCTCTCAAATCCAGACTGACCATCATCAA
GGACAACTCCAAGAGCCAAGTTTTCTTAAAAATGAACAGTCTGCAAACTGATGACACAGCCATT
TACTACTGTGCCAAACATTATTACTACGGTGGTAGCTATGCTATGGACTACTGGGGTCAAGGAA
CCTCAGTCACCGTCTCCTCAGCGGCCGCAATTGAAGTTATGTATCCTCCTCCTTACCTAGACAA
TGAGAAGAGCAATGGAACCATTATCCATGTGAAAGGGAAACACCTTTGTCCAAGTCCCCTATTT
CCCGGACCTTCTAAGCCCTTTTGGGTGCTGGTGGTGGTTGGGGGAGTCCTGGCTTGCTATAGCT
TGCTAGTAACAGTGGCCTTTATTATTTTCTGGGTGAGGAGTAAGAGGAGCAGGCTCCTGCACAG
TGACTACATGAACATGACTCCCCGCCGCCCCGGGCCCACCCGCAAGCATTACCAGCCCTATGCC
CCACCACGCGACTTCGCAGCCTATCGCTCCAGAGTGAAGTTCAGCAGGAGCGCAGACGCCCCCG
CGTACCAGCAGGGCCAGAACCAGCTCTATAACGAGCTCAATCTAGGACGAAGAGAGGAGTACGA
TGTTTTGGACAAGAGACGTGGCCGGGACCCTGAGATGGGGGGAAAGCCGAGAAGGAAGAACCCT
CAGGAAGGCCTGTACAATGAACTGCAGAAAGATAAGATGGCGGAGGCCTACAGTGAGATTGGGA
TGAAAGGCGAGCGCCGGAGGGGCAAGGGGCACGATGGCCTTTACCAGGGTCTCAGTACAGCCAC
CAAGGACACCTACGACGCCCTTCACATGCAGGCCCTGCCCCCTCGCTAAAGCGGCCGCGTCGAG
TCTAGAGGGCCCGTTTAAACCCGCTGATCAGCCTCGACTGTGCCTTCTAGTTGCCAGCCATCTG
TTGTTTGCCCCTCCCCCGTGCCTTCCTTGACCCTGGAAGGTGCCACTCCCACTGTCCTTTCCTA
ATAAAATGAGGAAATTGCATCGCATTGTCTGAGTAGGTGTCATTCTATTCTGGGGGGTGGGGTG
GGGCAGGACAGCAAGGGGGAGGATTGGGAAGACAATAGCAGGCATGCTGGGGATGCGGTGGGCT
CTATGGATTTGGCTACAGCAACAGGGTGGTGGACCTCATGGCCCACATGGCCTCCAAGGAGTAA
GACCCCTGGACCACCAGCCCCAGCAAGAGCACAAGAGGAAGAGAGAGACCCTCACTGCTGGGGA
GTCCCTGCCACACTCAGTCCCCCACCACACTGAATCTCCCCTCCTCACAGTTGCCATGTAGACC
CCTTGAAGAGGGGAGGGGCCTAGGGAGCCGCACCTTGTCATGTACCATCAATAAAGTACCCTGT
GCTCAACCAGTTACTTGTCCTGTCTTATTCTAGGGTCTGGGGCAGAGGGGAGGGAAGCTGGGCT
TGTGTCAAGGTGAGACATTCTTGCTGGGGAGGGACCTGGTATGTTCTCCTCAGACTGAGGGTAG
GGCCTCCAAACAGCCTTGCTTGCTTCGAGAACCATTTGCTTCCCGCTCAGACGTCTTGAGTGCT
ACAGGAAGCTGGCACCACTACTTCAGAGAACAAGGCCTTTTCCTCTCCTCGCTCCAGT
exemplary donor template for insertion at GAPDH locus
SEQ ID NO: 207
GTCGACGAAGACTGTGGATGGCCCCTCCGGGAAACTGTGGCGTGATGGCCGCGGGGCTCTCCAG
AACATCATCCCTGCCTCTACTGGCGCTGCCAAGGCTGTGGGCAAGGTCATCCCTGAGCTGAACG
GGAAGCTCACTGGCATGGCCTTCCGTGTCCCCACTGCCAACGTGTCAGTGGTGGACCTGACCTG
CCGTCTAGAAAAACCTGCCAAATATGATGACATCAAGAAGGTGGTGAAGCAGGCGTCGGAGGGC
CCCCTCAAGGGCATCCTGGGCTACACTGAGCACCAGGTGGTCTCCTCTGACTTCAACAGCGACA
CCCACTCCTCCACCTTTGACGCTGGGGCTGGCATTGCCCTCAACGACCACTTTGTCAAGCTCAT
TTCCTGGTATGTGGCTGGGGCCAGAGACTGGCTCTTAAAAAGTGCAGGGTCTGGCGCCCTCTGG
TGGCTGGCTCAGAAAAAGGGCCCTGACAACTCTTTACATCTTCTAGGTATGACAACGAGTTCGG
ATATAGCAATAGAGTGGTCGATCTGATGGCTCATATGGCTAGCAAAGAGGGAAGCGGAGCTACT
AACTTCAGCCTGCTGAAGCAGGCTGGAGACGTGGAGGAGAACCCTGGACCTATGGCACTCCCCG
TCACCGCCCTTCTCTTGCCCCTCGCCCTGCTGCTGCATGCTGCCAGGCCCATGGACGAAGTGCA
GCTCGTGGAGTCCGGTGGAGGACTCGTCCAACCGGGCGGATCCCTTCGCTTGTCCTGCGCCGCA
TCAGGCTTCAGCTTCACCAACTATGGCGTCCACTGGGTCAGACAGGCCCCCGGAAAGGGACTGG
AATGGGTGTCCGTGATCTGGAGCGGCGGGAACACCGACTACAACACCTCCGTGAAGGGCCGGTT
CACTATTAGCCGCGACAACTCCAAGAACACTCTGTACCTCCAAATGAACTCCCTGAGGGCCGAA
GATACTGCTGTGTACTATTGCGCGAGAGCCCTGACCTACTACGACTACGAGTTCGCGTACTGGG
GCCAGGGGACTCTCGTGACCGTGTCCAGCGGTGGTGGAGGTTCCGGAGGCGGAGGTTCTGGTGG
CGGGGGATCAGAAATCGTGCTGACTCAGTCCCCTGCGACCTTGTCCCTGAGCCCTGGAGAACGG
GCCACCCTGAGCTGTAGAGCCAGCCAGAGCATCGGGACAAATATTCACTGGTACCAGCAGAAAC
CCGGACAAGCACCACGGCTGCTGATCTACTACGCCTCCGAGTCGATTTCCGGAATCCCGGCTCG
CTTTTCGGGGTCTGGATCGGGAACGGACTTCACTCTGACCATCTCGTCGCTGGAACCCGAGGAT
TTCGCCGTGTACTACTGCCAACAGAACAACAATTGGCCGACCACGTTCGGCCAGGGCACCAAGC
TCGAGATTAAGGGATCACTGGAAGCGGCCGCAACCACAACACCTGCTCCAAGGCCCCCCACACC
CGCTCCAACTATAGCCAGCCAACCATTGAGCCTCAGACCTGAAGCTTGCAGGCCCGCAGCAGGA
GGCGCCGTCCATACGCGAGGCCTGGACTTCGCGTGTGATATTTATATTTGGGCCCCTTTGGCCG
GAACATGTGGGGTGTTGCTTCTCTCCCTTGTGATCACTCTGTATTGTAAGCGCGGGAGAAAGAA
GCTCCTGTACATCTTCAAGCAGCCTTTTATGCGACCTGTGCAAACCACTCAGGAAGAAGATGGG
TGTTCATGCCGCTTCCCCGAGGAGGAAGAAGGAGGGTGTGAACTGAGGGTGAAATTTTCTAGAA
GCGCCGATGCTCCCGCATATCAGCAGGGTCAGAATCAGCTCTACAATGAATTGAATCTCGGCAG
GCGAGAAGAGTACGATGTTCTGGACAAGAGACGGGGCAGGGATCCCGAGATGGGGGGAAAGCCC
CGGAGAAAAAATCCTCAGGAGGGGTTGTACAATGAGCTGCAGAAGGACAAGATGGCTGAAGCCT
ATAGCGAGATCGGAATGAAAGGCGAAAGACGCAGAGGCAAGGGGCATGACGGTCTGTACCAGGG
TCTCTCTACAGCCACCAAGGACACTTATGATGCGTTGCATATGCAAGCCTTGCCACCCCGCTAA
AGCGGCCGCGTCGAGTCTAGAGGGCCCGTTTAAACCCGCTGATCAGCCTCGACTGTGCCTTCTA
GTTGCCAGCCATCTGTTGTTTGCCCCTCCCCCGTGCCTTCCTTGACCCTGGAAGGTGCCACTCC
CACTGTCCTTTCCTAATAAAATGAGGAAATTGCATCGCATTGTCTGAGTAGGTGTCATTCTATT
CTGGGGGGTGGGGTGGGGCAGGACAGCAAGGGGGAGGATTGGGAAGACAATAGCAGGCATGCTG
GGGATGCGGTGGGCTCTATGGATTTGGCTACAGCAACAGGGTGGTGGACCTCATGGCCCACATG
GCCTCCAAGGAGTAAGACCCCTGGACCACCAGCCCCAGCAAGAGCACAAGAGGAAGAGAGAGAC
CCTCACTGCTGGGGAGTCCCTGCCACACTCAGTCCCCCACCACACTGAATCTCCCCTCCTCACA
GTTGCCATGTAGACCCCTTGAAGAGGGGAGGGGCCTAGGGAGCCGCACCTTGTCATGTACCATC
AATAAAGTACCCTGTGCTCAACCAGTTACTTGTCCTGTCTTATTCTAGGGTCTGGGGCAGAGGG
GAGGGAAGCTGGGCTTGTGTCAAGGTGAGACATTCTTGCTGGGGAGGGACCTGGTATGTTCTCC
TCAGACTGAGGGTAGGGCCTCCAAACAGCCTTGCTTGCTTCGAGAACCATTTGCTTCCCGCTCA
GACGTCTTGAGTGCTACAGGAAGCTGGCACCACTACTTCAGAGAACAAGGCCTTTTCCTCTCCT
CGCTCCAGT
exemplary donor template for insertion at GAPDH locus
SEQ ID NO: 208
GAAGACTGTGGATGGCCCCTCCGGGAAACTGTGGCGTGATGGCCGCGGGGCTCTCCAGAACATC
ATCCCTGCCTCTACTGGCGCTGCCAAGGCTGTGGGCAAGGTCATCCCTGAGCTGAACGGGAAGC
TCACTGGCATGGCCTTCCGTGTCCCCACTGCCAACGTGTCAGTGGTGGACCTGACCTGCCGTCT
AGAAAAACCTGCCAAATATGATGACATCAAGAAGGTGGTGAAGCAGGCGTCGGAGGGCCCCCTC
AAGGGCATCCTGGGCTACACTGAGCACCAGGTGGTCTCCTCTGACTTCAACAGCGACACCCACT
CCTCCACCTTTGACGCTGGGGCTGGCATTGCCCTCAACGACCACTTTGTCAAGCTCATTTCCTG
GTATGTGGCTGGGGCCAGAGACTGGCTCTTAAAAAGTGCAGGGTCTGGCGCCCTCTGGTGGCTG
GCTCAGAAAAAGGGCCCTGACAACTCTTTACATCTTCTAGGTATGACAACGAGTTCGGATATAG
CAATAGAGTGGTCGATCTGATGGCTCATATGGCTAGCAAAGAGGGAAGCGGAGCTACTAACTTC
AGCCTGCTGAAGCAGGCTGGAGACGTGGAGGAGAACCCTGGACCTATGGATTGGACCTGGATCC
TGTTTCTGGTGGCCGCTGCCACAAGAGTGCACAGCAATTGGGTCAACGTGATCAGCGACCTGAA
GAAGATCGAGGAGCTGATCCAGAGCATGCACATCGAGGCCACACTGTAGACCGAGTCCGATGTG
CACCCTAGCTGCAAAGTGACCGCCATGAAGTGCTTTCTGCTGGAACTGCAAGTGATCAGCCTGG
AAAGCGGCGACGCCAGCATCCACGATACCGTGGAAAACCTGATCATCCTGGCCAACAACAGCCT
GAGCAGCAACGGCAATGTGACCGAGAGCGGCTGCAAAGAGTGCGAGGAACTGGAAGAGAAGAAC
ATCAAAGAGTTCCTCCAGAGCTTCGTCCACATCGTGCAGATGTTCATCAACACCAGCGGAAGCG
GAGCCACAAACTTCTCTCTGCTGAAGCAGGCAGGAGATGTTGAAGAAAACCCTGGACCTATCAC
CTGTCCTCCACCTATGAGCGTGGAACACGCCGACATCTGGGTCAAGAGCTACAGCCTGTACAGC
AGAGAGCGGTACATCTGCAACAGCGGCTTCAAGAGAAAGGCCGGCACAAGCAGCCTGACCGAGT
GTGTGCTGAACAAGGCCACAAACGTGGCCCACTGGACCACACCTAGCCTGAAGTGCATCAGAGA
TCCCGCTCTGGTTCATCAGAGGCCTGCCCCTCCATCTACAGTGACAACAGCTGGCGTGACCCCT
CAGCCTGAGTCTCTGTCTCCATCTGGAAAAGAGCCTGCCGCCAGCTCTCCCAGCTCTAACAATA
CTGCTGCCACCACAGCCGCTATCGTGCCTGGATCTCAGCTGATGCCTAGCAAGAGCCCTAGCAC
CGGCACAACAGAGATCAGCTCTCACGAGAGCAGCCACGGAACACCTTCTCAGACCACCGCCAAG
AATTGGGAGCTGACAGCCTCTGCCTCTCATCAGCCACCTGGCGTGTACCCACAGGGCCACTCTG
ATACAACAGTGGCCATCAGCACCAGCACCGTTCTGCTGTGTGGCCTGTCTGCTGTTAGCCTGCT
GGCCTGCTACCTGAAGTCTAGACAGACACCTCCTCTGGCCAGCGTGGAAATGGAAGCCATGGAA
GCTCTGCCTGTCACATGGGGCACCAGCAGCAGAGATGAGGACCTCGAGAATTGCAGCCACCACC
TGGGAAGCGGAGCCACAAACTTCTCTCTGCTGAAGCAGGCAGGAGATGTTGAAGAAAACCCTGG
ACCTATGGTGAGCAAGGGCGAGGAGCTGTTCACCGGGGTGGTGCCCATCCTGGTCGAGCTGGAC
GGCGACGTAAACGGCCACAAGTTCAGCGTGTCCGGCGAGGGCGAGGGCGATGCCACCTACGGCA
AGCTGACCCTGAAGTTCATCTGCACCACCGGCAAGCTGCCCGTGCCCTGGCCCACCCTCGTGAC
CACCCTGACCTACGGCGTGCAGTGCTTCAGCCGCTACCCCGACCACATGAAGCAGCACGACTTC
TTCAAGTCCGCCATGCCCGAAGGCTACGTCCAGGAGCGCACCATCTTCTTCAAGGACGACGGCA
ACTACAAGACCCGCGCCGAGGTGAAGTTCGAGGGCGACACCCTGGTGAACCGCATCGAGCTGAA
GGGCATCGACTTCAAGGAGGACGGCAACATCCTGGGGCACAAGCTGGAGTACAACTACAACAGC
CACAACGTCTATATCATGGCCGACAAGCAGAAGAACGGCATCAAGGTGAACTTCAAGATCCGCC
ACAACATCGAGGACGGCAGCGTGCAGCTCGCCGACCACTACCAGCAGAACACCCCCATCGGCGA
CGGCCCCGTGCTGCTGCCCGACAACCACTACCTGAGCACCCAGTCCGCCCTGAGCAAAGACCCC
AACGAGAAGCGCGATCACATGGTCCTGCTGGAGTTCGTGACCGCCGCCGGGATCACTCTCGGCA
TGGACGAGCTGTACAAGTAAGCGGCCGCGTCGAGTCTAGAGGGCCCGTTTAAACCCGCTGATCA
GCCTCGACTGTGCCTTCTAGTTGCCAGCCATCTGTTGTTTGCCCCTCCCCCGTGCCTTCCTTGA
CCCTGGAAGGTGCCACTCCCACTGTCCTTTCCTAATAAAATGAGGAAATTGCATCGCATTGTCT
GAGTAGGTGTCATTCTATTCTGGGGGGTGGGGTGGGGCAGGACAGCAAGGGGGAGGATTGGGAA
GACAATAGCAGGCATGCTGGGGATGCGGTGGGCTCTATGGATTTGGCTACAGCAACAGGGTGGT
GGACCTCATGGCCCACATGGCCTCCAAGGAGTAAGACCCCTGGACCACCAGCCCCAGCAAGAGC
ACAAGAGGAAGAGAGAGACCCTCACTGCTGGGGAGTCCCTGCCACACTCAGTCCCCCACCACAC
TGAATCTCCCCTCCTCACAGTTGCCATGTAGACCCCTTGAAGAGGGGAGGGGCCTAGGGAGCCG
CACCTTGTCATGTACCATCAATAAAGTACCCTGTGCTCAACCAGTTACTTGTCCTGTCTTATTC
TAGGGTCTGGGGCAGAGGGGAGGGAAGCTGGGCTTGTGTCAAGGTGAGACATTCTTGCTGGGGA
GGGACCTGGTATGTTCTCCTCAGACTGAGGGTAGGGCCTCCAAACAGCCTTGCTTGCTTCGAGA
ACCATTTGCTTCCCGCTCAGACGTCTTGAGTGCTACAGGAAGCTGGCACCACTACTTCAGAGAA
CAAGGCCTTTTCCTCTCCTCGCTCCAGT
exemplary donor template for insertion at GAPDH locus
SEQ ID NO: 209
GAAGACTGTGGATGGCCCCTCCGGGAAACTGTGGCGTGATGGCCGCGGGGCTCTCCAGAACATC
ATCCCTGCCTCTACTGGCGCTGCCAAGGCTGTGGGCAAGGTCATCCCTGAGCTGAACGGGAAGC
TCACTGGCATGGCCTTCCGTGTCCCCACTGCCAACGTGTCAGTGGTGGACCTGACCTGCCGTCT
AGAAAAACCTGCCAAATATGATGACATCAAGAAGGTGGTGAAGCAGGCGTCGGAGGGCCCCCTC
AAGGGCATCCTGGGCTACACTGAGCACCAGGTGGTCTCCTCTGACTTCAACAGCGACACCCACT
CCTCCACCTTTGACGCTGGGGCTGGCATTGCCCTCAACGACCACTTTGTCAAGCTCATTTCCTG
GTATGTGGCTGGGGCCAGAGACTGGCTCTTAAAAAGTGCAGGGTCTGGCGCCCTCTGGTGGCTG
GCTCAGAAAAAGGGCCCTGACAACTCTTTACATCTTCTAGGTATGACAACGAGTTCGGATATAG
CAATAGAGTGGTCGATCTGATGGCTCATATGGCTAGCAAAGAGGGAAGCGGAGCTACTAACTTC
AGCCTGCTGAAGCAGGCTGGAGACGTGGAGGAGAACCCTGGACCTATGTGGCAGCTGTTGCTGC
CGACAGCCCTCCTGTTGCTGGTCTCCGCTGGCATGAGAACCGAGGATCTGCCTAAGGCCGTGGT
GTTCCTGGAACCTCAGTGGTACAGAGTGCTGGAAAAGGACAGCGTGACCCTGAAGTGCCAGGGC
GCCTATTCTCCCGAGGACAATAGCACCCAGTGGTTCCACAACGAGAGCCTGATCAGCAGCCAGG
CCAGCAGCTACTTTATCGATGCCGCCACCGTGGACGACAGCGGCGAGTACAGATGCCAGACCAA
TCTGAGCACCCTGAGCGACCCTGTGCAGCTGGAAGTGCACATTGGATGGTTGCTGCTGCAAGCC
CCTAGATGGGTGTTCAAAGAAGAGGACCCCATCCACCTGAGATGCCACTCTTGGAAGAACACAG
CCCTGCACAAAGTGACCTACCTGCAGAACGGCAAGGGCAGAAAGTACTTCCACCACAACAGCGA
CTTCTACATCCCCAAGGCCACACTGAAGGACTCCGGCTCCTACTTCTGCAGAGGCCTGGTCGGC
AGCAAGAACGTGTCCAGCGAGACAGTGAACATCACCATCACACAGGGCCTCGCCGTGTCTACCA
TCAGCAGCTTTTTCCCACCTGGCTATCAGGTGTCCTTCTGCCTGGTCATGGTGCTGCTGTTCGC
CGTGGATACCGGCCTGTACTTCAGCGTCAAGACCAACATCCGGTCCAGCACCAGAGACTGGAAG
GACCACAAGTTCAAGTGGCGGAAGGACCCTCAGGACAAGGGAAGCGGAGCCACAAACTTCTCTC
TGCTGAAGCAGGCAGGAGATGTTGAAGAAAACCCTGGACCTATGGATTGGACCTGGATCCTGTT
TCTGGTGGCCGCTGCCACAAGAGTGCACAGCAATTGGGTCAACGTGATCAGCGACCTGAAGAAG
ATCGAGGACCTGATCCAGAGCATGCACATCGACGCCACACTGTACACCGAGTCCGATGTGCACC
CTAGCTGCAAAGTGACCGCCATGAAGTGCTTTCTGCTGGAACTGCAAGTGATCAGCCTGGAAAG
CGGCGACGCCAGCATCCACGATACCGTGGAAAACCTGATCATCCTGGCCAACAACAGCCTGAGC
AGCAACGGCAATGTGACCGAGAGCGGCTGCAAAGAGTGCGAGGAACTGGAAGAGAAGAACATCA
AAGAGTTCCTCCAGAGCTTCGTCCACATCGTGCAGATGTTCATCAACACCAGCGGAAGCGGAGC
CACAAACTTCTCTCTGCTGAAGCAGGCAGGAGATGTTGAAGAAAACCCTGGACCTATCACCTGT
CCTCCACCTATGAGCGTGGAACACGCCGACATCTGGGTCAAGAGCTACAGCCTGTACAGCAGAG
AGCGGTACATCTGCAACAGCGGCTTCAAGAGAAAGGCCGGCACAAGCAGCCTGACCGAGTGTGT
GCTGAACAAGGCCACAAACGTGGCCCACTGGACCACACCTAGCCTGAAGTGCATCAGAGATCCC
GCTCTGGTTCATCAGAGGCCTGCCCCTCCATCTACAGTGACAACAGCTGGCGTGACCCCTCAGC
CTGAGTCTCTGTCTCCATCTGGAAAAGAGCCTGCCGCCAGCTCTCCCAGCTCTAACAATACTGC
TGCCACCACAGCCGCTATCGTGCCTGGATCTCAGCTGATGCCTAGCAAGAGCCCTAGCACCGGC
ACAACAGAGATCAGCTCTCACGAGAGCAGCCACGGAACACCTTCTCAGACCACCGCCAAGAATT
GGGAGCTGACAGCCTCTGCCTCTCATCAGCCACCTGGCGTGTACCCACAGGGCCACTCTGATAC
AACAGTGGCCATCAGCACCAGCACCGTTCTGCTGTGTGGCCTGTCTGCTGTTAGCCTGCTGGCC
TGCTACCTGAAGTCTAGACAGACACCTCCTCTGGCCAGCGTGGAAATGGAAGCCATGGAAGCTC
TGCCTGTCACATGGGGCACCAGCAGCAGAGATGAGGACCTCGAGAATTGCAGCCACCACCTGTA
AGCGGCCGCGTCGAGTCTAGAGGGCCCGTTTAAACCCGCTGATCAGCCTCGACTGTGCCTTCTA
GTTGCCAGCCATCTGTTGTTTGCCCCTCCCCCGTGCCTTCCTTGACCCTGGAAGGTGCCACTCC
CACTGTCCTTTCCTAATAAAATGAGGAAATTGCATCGCATTGTCTGAGTAGGTGTCATTCTATT
CTGGGGGGTGGGGTGGGGCAGGACAGCAAGGGGGAGGATTGGGAAGACAATAGCAGGCATGCTG
GGGATGCGGTGGGCTCTATGGATTTGGCTACAGCAACAGGGTGGTGGACCTCATGGCCCACATG
GCCTCCAAGGAGTAAGACCCCTGGACCACCAGCCCCAGCAAGAGCACAAGAGGAAGAGAGAGAC
CCTCACTGCTGGGGAGTCCCTGCCACACTCAGTCCCCCACCACACTGAATCTCCCCTCCTCACA
GTTGCCATGTAGACCCCTTGAAGAGGGGAGGGGCCTAGGGAGCCGCACCTTGTCATGTACCATC
AATAAAGTACCCTGTGCTCAACCAGTTACTTGTCCTGTCTTATTCTAGGGTCTGGGGCAGAGGG
GAGGGAAGCTGGGCTTGTGTCAAGGTGAGACATTCTTGCTGGGGAGGGACCTGGTATGTTCTCC
TCAGACTGAGGGTAGGGCCTCCAAACAGCCTTGCTTGCTTCGAGAACCATTTGCTTCCCGCTCA
GACGTCTTGAGTGCTACAGGAAGCTGGCACCACTACTTCAGAGAACAAGGCCTTTTCCTCTCCT
CGCTCCAGT
exemplary donor template for insertion at GAPDH locus
SEQ ID NO: 210
GAAGACTGTGGATGGCCCCTCCGGGAAACTGTGGCGTGATGGCCGCGGGGCTCTCCAGAACATC
ATCCCTGCCTCTACTGGCGCTGCCAAGGCTGTGGGCAAGGTCATCCCTGAGCTGAACGGGAAGC
TCACTGGCATGGCCTTCCGTGTCCCCACTGCCAACGTGTCAGTGGTGGACCTGACCTGCCGTCT
AGAAAAACCTGCCAAATATGATGACATCAAGAAGGTGGTGAAGCAGGCGTCGGAGGGCCCCCTC
AAGGGCATCCTGGGCTACACTGAGCACCAGGTGGTCTCCTCTGACTTCAACAGCGACACCCACT
CCTCCACCTTTGACGCTGGGGCTGGCATTGCCCTCAACGACCACTTTGTCAAGCTCATTTCCTG
GTATGTGGCTGGGGCCAGAGACTGGCTCTTAAAAAGTGCAGGGTCTGGCGCCCTCTGGTGGCTG
GCTCAGAAAAAGGGCCCTGACAACTCTTTACATCTTCTAGGTATGACAACGAGTTCGGATATAG
CAATAGAGTGGTCGATCTGATGGCTCATATGGCTAGCAAAGAGGGAAGCGGAGCTACTAACTTC
AGCCTGCTGAAGCAGGCTGGAGACGTGGAGGAGAACCCTGGACCTATGGATTGGACCTGGATCC
TGTTTCTGGTGGCCGCTGCCACAAGAGTGCACAGCAATTGGGTCAACGTGATCAGCGACCTGAA
GAAGATCGAGGAGCTGATCCAGAGCATGGAGATCGAGGCCACACTGTAGACCGAGTCCGATGTG
CACCCTAGCTGCAAAGTGACCGCCATGAAGTGCTTTCTGCTGGAACTGCAAGTGATCAGCCTGG
AAAGCGGCGACGCCAGCATCCACGATACCGTGGAAAACCTGATCATCCTGGCCAACAACAGCCT
GAGCAGCAACGGCAATGTGACCGAGAGCGGCTGCAAAGAGTGCGAGGAACTGGAAGAGAAGAAC
ATCAAAGAGTTCCTCCAGAGCTTCGTCCACATCGTGCAGATGTTCATCAACACCAGCTCTGGCG
GAGGAAGCGGAGGCGGAGGATCTGGTGGTGGTGGATCTGGCGGCGGTGGTAGTGGCGGAGGTTC
TCTGCAAATCACCTGTCCTCCACCTATGAGCGTGGAACACGCCGACATCTGGGTCAAGAGCTAC
AGCCTGTACAGCAGAGAGCGGTACATCTGCAACAGCGGCTTCAAGAGAAAGGCCGGCACAAGCA
GCCTGACCGAGTGTGTGCTGAACAAGGCCACAAACGTGGCCCACTGGACCACACCTAGCCTGAA
GTGCATCAGAGATCCCGCTCTGGTTCATCAGAGGCCTGCCCCTCCATCTACAGTGACAACAGCT
GGCGTGACCCCTCAGCCTGAGTCTCTGTCTCCATCTGGAAAAGAGCCTGCCGCCAGCTCTCCCA
GCTCTAACAATACTGCTGCCACCACAGCCGCTATCGTGCCTGGATCTCAGCTGATGCCTAGCAA
GAGCCCTAGCACCGGCACAACAGAGATCAGCTCTCACGAGAGCAGCCACGGAACACCTTCTCAG
ACCACCGCCAAGAATTGGGAGCTGACAGCCTCTGCCTCTCATCAGCCACCTGGCGTGTACCCAC
AGGGCCACTCTGATACAACAGTGGCCATCAGCACCAGCACCGTTCTGCTGTGTGGCCTGTCTGC
TGTTAGCCTGCTGGCCTGCTACCTGAAGTCTAGACAGACACCTCCTCTGGCCAGCGTGGAAATG
GAAGCCATGGAAGCTCTGCCTGTCACATGGGGCACCAGCAGCAGAGATGAGGACCTCGAGAATT
GCAGCCACCACCTGGGAAGCGGAGCCACAAACTTCTCTCTGCTGAAGCAGGCAGGAGATGTTGA
AGAAAACCCTGGACCTATGTGGCAGCTGTTGCTGCCGACAGCCCTCCTGTTGCTGGTCTCCGCT
GGCATGAGAACCGAGGATCTGCCTAAGGCCGTGGTGTTCCTGGAACCTCAGTGGTACAGAGTGC
TGGAAAAGGACAGCGTGACCCTGAAGTGCCAGGGCGCCTATTCTCCCGAGGACAATAGCACCCA
GTGGTTCCACAACGAGAGCCTGATCAGCAGCCAGGCCAGCAGCTACTTTATCGATGCCGCCACC
GTGGACGACAGCGGCGAGTACAGATGCCAGACCAATCTGAGCACCCTGAGCGACCCTGTGCAGC
TGGAAGTGCACATTGGATGGTTGCTGCTGCAAGCCCCTAGATGGGTGTTCAAAGAAGAGGACCC
CATCCACCTGAGATGCCACTCTTGGAAGAACACAGCCCTGCACAAAGTGACCTACCTGCAGAAC
GGCAAGGGCAGAAAGTACTTCCACCACAACAGCGACTTCTACATCCCCAAGGCCACACTGAAGG
ACTCCGGCTCCTACTTCTGCAGAGGCCTGGTCGGCAGCAAGAACGTGTCCAGCGAGACAGTGAA
CATCACCATCACACAGGGCCTCGCCGTGTCTACCATCAGCAGCTTTTTCCCACCTGGCTATCAG
GTGTCCTTCTGCCTGGTCATGGTGCTGCTGTTCGCCGTGGATACCGGCCTGTACTTCAGCGTCA
AGACCAACATCCGGTCCAGCACCAGAGACTGGAAGGACCACAAGTTCAAGTGGCGGAAGGACCC
TCAGGACAAGTAAGCGGCCGCGTCGAGTCTAGAGGGCCCGTTTAAACCCGCTGATCAGCCTCGA
CTGTGCCTTCTAGTTGCCAGCCATCTGTTGTTTGCCCCTCCCCCGTGCCTTCCTTGACCCTGGA
AGGTGCCACTCCCACTGTCCTTTCCTAATAAAATGAGGAAATTGCATCGCATTGTCTGAGTAGG
TGTCATTCTATTCTGGGGGGTGGGGTGGGGCAGGACAGCAAGGGGGAGGATTGGGAAGACAATA
GCAGGCATGCTGGGGATGCGGTGGGCTCTATGGATTTGGCTACAGCAACAGGGTGGTGGACCTC
ATGGCCCACATGGCCTCCAAGGAGTAAGACCCCTGGACCACCAGCCCCAGCAAGAGCACAAGAG
GAAGAGAGAGACCCTCACTGCTGGGGAGTCCCTGCCACACTCAGTCCCCCACCACACTGAATCT
CCCCTCCTCACAGTTGCCATGTAGACCCCTTGAAGAGGGGAGGGGCCTAGGGAGCCGCACCTTG
TCATGTACCATCAATAAAGTACCCTGTGCTCAACCAGTTACTTGTCCTGTCTTATTCTAGGGTC
TGGGGCAGAGGGGAGGGAAGCTGGGCTTGTGTCAAGGTGAGACATTCTTGCTGGGGAGGGACCT
GGTATGTTCTCCTCAGACTGAGGGTAGGGCCTCCAAACAGCCTTGCTTGCTTCGAGAACCATTT
GCTTCCCGCTCAGACGTCTTGAGTGCTACAGGAAGCTGGCACCACTACTTCAGAGAACAAGGCC
TTTTCCTCTCCTCGCTCCAGT
exemplary donor template for insertion at GAPDH locus
SEQ ID NO: 211
GAAGACTGTGGATGGCCCCTCCGGGAAACTGTGGCGTGATGGCCGCGGGGCTCTCCAGAACATC
ATCCCTGCCTCTACTGGCGCTGCCAAGGCTGTGGGCAAGGTCATCCCTGAGCTGAACGGGAAGC
TCACTGGCATGGCCTTCCGTGTCCCCACTGCCAACGTGTCAGTGGTGGACCTGACCTGCCGTCT
AGAAAAACCTGCCAAATATGATGACATCAAGAAGGTGGTGAAGCAGGCGTCGGAGGGCCCCCTC
AAGGGCATCCTGGGCTACACTGAGCACCAGGTGGTCTCCTCTGACTTCAACAGCGACACCCACT
CCTCCACCTTTGACGCTGGGGCTGGCATTGCCCTCAACGACCACTTTGTCAAGCTCATTTCCTG
GTATGTGGCTGGGGCCAGAGACTGGCTCTTAAAAAGTGCAGGGTCTGGCGCCCTCTGGTGGCTG
GCTCAGAAAAAGGGCCCTGACAACTCTTTACATCTTCTAGGTATGACAACGAGTTCGGATATAG
CAATAGAGTGGTCGATCTGATGGCTCATATGGCTAGCAAAGAGGGAAGCGGAGCTACTAACTTC
AGCCTGCTGAAGCAGGCTGGAGACGTGGAGGAGAACCCTGGACCTATGGATTGGACCTGGATCC
TGTTTCTGGTGGCCGCTGCCACAAGAGTGCACAGCAATTGGGTCAACGTGATCAGCGACCTGAA
GAAGATCGAGGAGCTGATCCAGAGCATGGAGATCGAGGCCACACTGTAGACCGAGTCCGATGTG
CACCCTAGCTGCAAAGTGACCGCCATGAAGTGCTTTCTGCTGGAACTGCAAGTGATCAGCCTGG
AAAGCGGCGACGCCAGCATCCACGATACCGTGGAAAACCTGATCATCCTGGCCAACAACAGCCT
GAGCAGCAACGGCAATGTGACCGAGAGCGGCTGCAAAGAGTGCGAGGAACTGGAAGAGAAGAAC
ATCAAAGAGTTCCTCCAGAGCTTCGTCCACATCGTGCAGATGTTCATCAACACCAGCGGAAGCG
GAGCCACAAACTTCTCTCTGCTGAAGCAGGCAGGAGATGTTGAAGAAAACCCTGGACCTATCAC
CTGTCCTCCACCTATGAGCGTGGAACACGCCGACATCTGGGTCAAGAGCTACAGCCTGTACAGC
AGAGAGCGGTACATCTGCAACAGCGGCTTCAAGAGAAAGGCCGGCACAAGCAGCCTGACCGAGT
GTGTGCTGAACAAGGCCACAAACGTGGCCCACTGGACCACACCTAGCCTGAAGTGCATCAGAGA
TCCCGCTCTGGTTCATCAGAGGCCTGCCCCTCCATCTACAGTGACAACAGCTGGCGTGACCCCT
CAGCCTGAGTCTCTGTCTCCATCTGGAAAAGAGCCTGCCGCCAGCTCTCCCAGCTCTAACAATA
CTGCTGCCACCACAGCCGCTATCGTGCCTGGATCTCAGCTGATGCCTAGCAAGAGCCCTAGCAC
CGGCACAACAGAGATCAGCTCTCACGAGAGCAGCCACGGAACACCTTCTCAGACCACCGCCAAG
AATTGGGAGCTGACAGCCTCTGCCTCTCATCAGCCACCTGGCGTGTACCCACAGGGCCACTCTG
ATACAACAGTGGCCATCAGCACCAGCACCGTTCTGCTGTGTGGCCTGTCTGCTGTTAGCCTGCT
GGCCTGCTACCTGAAGTCTAGACAGACACCTCCTCTGGCCAGCGTGGAAATGGAAGCCATGGAA
GCTCTGCCTGTCACATGGGGCACCAGCAGCAGAGATGAGGACCTCGAGAATTGCAGCCACCACC
TGGGAAGCGGAGCCACAAACTTCTCTCTGCTGAAGCAGGCAGGAGATGTTGAAGAAAACCCTGG
ACCTATGTGGCAGCTGTTGCTGCCGACAGCCCTCCTGTTGCTGGTCTCCGCTGGCATGAGAACC
GAGGATCTGCCTAAGGCCGTGGTGTTCCTGGAACCTCAGTGGTACAGAGTGCTGGAAAAGGACA
GCGTGACCCTGAAGTGCCAGGGCGCCTATTCTCCCGAGGACAATAGCACCCAGTGGTTCCACAA
CGAGAGCCTGATCAGCAGCCAGGCCAGCAGCTACTTTATCGATGCCGCCACCGTGGACGACAGC
GGCGAGTACAGATGCCAGACCAATCTGAGCACCCTGAGCGACCCTGTGCAGCTGGAAGTGCACA
TTGGATGGTTGCTGCTGCAAGCCCCTAGATGGGTGTTCAAAGAAGAGGACCCCATCCACCTGAG
ATGCCACTCTTGGAAGAACACAGCCCTGCACAAAGTGACCTACCTGCAGAACGGCAAGGGCAGA
AAGTACTTCCACCACAACAGCGACTTCTACATCCCCAAGGCCACACTGAAGGACTCCGGCTCCT
ACTTCTGCAGAGGCCTGGTCGGCAGCAAGAACGTGTCCAGCGAGACAGTGAACATCACCATCAC
ACAGGGCCTCGCCGTGTCTACCATCAGCAGCTTTTTCCCACCTGGCTATCAGGTGTCCTTCTGC
CTGGTCATGGTGCTGCTGTTCGCCGTGGATACCGGCCTGTACTTCAGCGTCAAGACCAACATCC
GGTCCAGCACCAGAGACTGGAAGGACCACAAGTTCAAGTGGCGGAAGGACCCTCAGGACAAGTA
AGCGGCCGCGTCGAGTCTAGAGGGCCCGTTTAAACCCGCTGATCAGCCTCGACTGTGCCTTCTA
GTTGCCAGCCATCTGTTGTTTGCCCCTCCCCCGTGCCTTCCTTGACCCTGGAAGGTGCCACTCC
CACTGTCCTTTCCTAATAAAATGAGGAAATTGCATCGCATTGTCTGAGTAGGTGTCATTCTATT
CTGGGGGGTGGGGTGGGGCAGGACAGCAAGGGGGAGGATTGGGAAGACAATAGCAGGCATGCTG
GGGATGCGGTGGGCTCTATGGATTTGGCTACAGCAACAGGGTGGTGGACCTCATGGCCCACATG
GCCTCCAAGGAGTAAGACCCCTGGACCACCAGCCCCAGCAAGAGCACAAGAGGAAGAGAGAGAC
CCTCACTGCTGGGGAGTCCCTGCCACACTCAGTCCCCCACCACACTGAATCTCCCCTCCTCACA
GTTGCCATGTAGACCCCTTGAAGAGGGGAGGGGCCTAGGGAGCCGCACCTTGTCATGTACCATC
AATAAAGTACCCTGTGCTCAACCAGTTACTTGTCCTGTCTTATTCTAGGGTCTGGGGCAGAGGG
GAGGGAAGCTGGGCTTGTGTCAAGGTGAGACATTCTTGCTGGGGAGGGACCTGGTATGTTCTCC
TCAGACTGAGGGTAGGGCCTCCAAACAGCCTTGCTTGCTTCGAGAACCATTTGCTTCCCGCTCA
GACGTCTTGAGTGCTACAGGAAGCTGGCACCACTACTTCAGAGAACAAGGCCTTTTCCTCTCCT
CGCTCCAGT
exemplary donor template for insertion at GAPDH locus
SEQ ID NO: 212
GAAGACTGTGGATGGCCCCTCCGGGAAACTGTGGCGTGATGGCCGCGGGGCTCTCCAGAACATC
ATCCCTGCCTCTACTGGCGCTGCCAAGGCTGTGGGCAAGGTCATCCCTGAGCTGAACGGGAAGC
TCACTGGCATGGCCTTCCGTGTCCCCACTGCCAACGTGTCAGTGGTGGACCTGACCTGCCGTCT
AGAAAAACCTGCCAAATATGATGACATCAAGAAGGTGGTGAAGCAGGCGTCGGAGGGCCCCCTC
AAGGGCATCCTGGGCTACACTGAGCACCAGGTGGTCTCCTCTGACTTCAACAGCGACACCCACT
CCTCCACCTTTGACGCTGGGGCTGGCATTGCCCTCAACGACCACTTTGTCAAGCTCATTTCCTG
GTATGTGGCTGGGGCCAGAGACTGGCTCTTAAAAAGTGCAGGGTCTGGCGCCCTCTGGTGGCTG
GCTCAGAAAAAGGGCCCTGACAACTCTTTACATCTTCTAGGTATGACAACGAGTTCGGATATAG
CAATAGAGTGGTCGATCTGATGGCTCATATGGCTAGCAAAGAGGGAAGCGGAGCTACTAACTTC
AGCCTGCTGAAGCAGGCTGGAGACGTGGAGGAGAACCCTGGACCTATGTGGCAGCTGTTGCTGC
CGACAGCCCTCCTGTTGCTGGTCTCCGCTGGCATGAGAACCGAGGATCTGCCTAAGGCCGTGGT
GTTCCTGGAACCTCAGTGGTACAGAGTGCTGGAAAAGGACAGCGTGACCCTGAAGTGCCAGGGC
GCCTATTCTCCCGAGGACAATAGCACCCAGTGGTTCCACAACGAGAGCCTGATCAGCAGCCAGG
CCAGCAGCTACTTTATCGATGCCGCCACCGTGGACGACAGCGGCGAGTACAGATGCCAGACCAA
TCTGAGCACCCTGAGCGACCCTGTGCAGCTGGAAGTGCACATTGGATGGTTGCTGCTGCAAGCC
CCTAGATGGGTGTTCAAAGAAGAGGACCCCATCCACCTGAGATGCCACTCTTGGAAGAACACAG
CCCTGCACAAAGTGACCTACCTGCAGAACGGCAAGGGCAGAAAGTACTTCCACCACAACAGCGA
CTTCTACATCCCCAAGGCCACACTGAAGGACTCCGGCTCCTACTTCTGCAGAGGCCTGGTCGGC
AGCAAGAACGTGTCCAGCGAGACAGTGAACATCACCATCACACAGGGCCTCGCCGTGTCTACCA
TCAGCAGCTTTTTCCCACCTGGCTATCAGGTGTCCTTCTGCCTGGTCATGGTGCTGCTGTTCGC
CGTGGATACCGGCCTGTACTTCAGCGTCAAGACCAACATCCGGTCCAGCACCAGAGACTGGAAG
GACCACAAGTTCAAGTGGCGGAAGGACCCTCAGGACAAGGGAAGCGGAGCCACAAACTTCTCTC
TGCTGAAGCAGGCAGGAGATGTTGAAGAAAACCCTGGACCTATGGATTGGACCTGGATCCTGTT
TCTGGTGGCCGCTGCCACAAGAGTGCACAGCAATTGGGTCAACGTGATCAGCGACCTGAAGAAG
ATCGAGGACCTGATCCAGAGCATGCACATCGACGCCACACTGTACACCGAGTCCGATGTGCACC
CTAGCTGCAAAGTGACCGCCATGAAGTGCTTTCTGCTGGAACTGCAAGTGATCAGCCTGGAAAG
CGGCGACGCCAGCATCCACGATACCGTGGAAAACCTGATCATCCTGGCCAACAACAGCCTGAGC
AGCAACGGCAATGTGACCGAGAGCGGCTGCAAAGAGTGCGAGGAACTGGAAGAGAAGAACATCA
AAGAGTTCCTCCAGAGCTTCGTCCACATCGTGCAGATGTTCATCAACACCAGCTCTGGCGGAGG
AAGCGGAGGCGGAGGATCTGGTGGTGGTGGATCTGGCGGCGGTGGTAGTGGCGGAGGTTCTCTG
CAAATCACCTGTCCTCCACCTATGAGCGTGGAACACGCCGACATCTGGGTCAAGAGCTACAGCC
TGTACAGCAGAGAGCGGTACATCTGCAACAGCGGCTTCAAGAGAAAGGCCGGCACAAGCAGCCT
GACCGAGTGTGTGCTGAACAAGGCCACAAACGTGGCCCACTGGACCACACCTAGCCTGAAGTGC
ATCAGAGATCCCGCTCTGGTTCATCAGAGGCCTGCCCCTCCATCTACAGTGACAACAGCTGGCG
TGACCCCTCAGCCTGAGTCTCTGTCTCCATCTGGAAAAGAGCCTGCCGCCAGCTCTCCCAGCTC
TAACAATACTGCTGCCACCACAGCCGCTATCGTGCCTGGATCTCAGCTGATGCCTAGCAAGAGC
CCTAGCACCGGCACAACAGAGATCAGCTCTCACGAGAGCAGCCACGGAACACCTTCTCAGACCA
CCGCCAAGAATTGGGAGCTGACAGCCTCTGCCTCTCATCAGCCACCTGGCGTGTACCCACAGGG
CCACTCTGATACAACAGTGGCCATCAGCACCAGCACCGTTCTGCTGTGTGGCCTGTCTGCTGTT
AGCCTGCTGGCCTGCTACCTGAAGTCTAGACAGACACCTCCTCTGGCCAGCGTGGAAATGGAAG
CCATGGAAGCTCTGCCTGTCACATGGGGCACCAGCAGCAGAGATGAGGACCTCGAGAATTGCAG
CCACCACCTGTAAGCGGCCGCGTCGAGTCTAGAGGGCCCGTTTAAACCCGCTGATCAGCCTCGA
CTGTGCCTTCTAGTTGCCAGCCATCTGTTGTTTGCCCCTCCCCCGTGCCTTCCTTGACCCTGGA
AGGTGCCACTCCCACTGTCCTTTCCTAATAAAATGAGGAAATTGCATCGCATTGTCTGAGTAGG
TGTCATTCTATTCTGGGGGGTGGGGTGGGGCAGGACAGCAAGGGGGAGGATTGGGAAGACAATA
GCAGGCATGCTGGGGATGCGGTGGGCTCTATGGATTTGGCTACAGCAACAGGGTGGTGGACCTC
ATGGCCCACATGGCCTCCAAGGAGTAAGACCCCTGGACCACCAGCCCCAGCAAGAGCACAAGAG
GAAGAGAGAGACCCTCACTGCTGGGGAGTCCCTGCCACACTCAGTCCCCCACCACACTGAATCT
CCCCTCCTCACAGTTGCCATGTAGACCCCTTGAAGAGGGGAGGGGCCTAGGGAGCCGCACCTTG
TCATGTACCATCAATAAAGTACCCTGTGCTCAACCAGTTACTTGTCCTGTCTTATTCTAGGGTC
TGGGGCAGAGGGGAGGGAAGCTGGGCTTGTGTCAAGGTGAGACATTCTTGCTGGGGAGGGACCT
GGTATGTTCTCCTCAGACTGAGGGTAGGGCCTCCAAACAGCCTTGCTTGCTTCGAGAACCATTT
GCTTCCCGCTCAGACGTCTTGAGTGCTACAGGAAGCTGGCACCACTACTTCAGAGAACAAGGCC
TTTTCCTCTCCTCGCTCCAGT
exemplary donor template for insertion at GAPDH locus
SEQ ID NO: 213
GAAGACTGTGGATGGCCCCTCCGGGAAACTGTGGCGTGATGGCCGCGGGGCTCTCCAGAACATC
ATCCCTGCCTCTACTGGCGCTGCCAAGGCTGTGGGCAAGGTCATCCCTGAGCTGAACGGGAAGC
TCACTGGCATGGCCTTCCGTGTCCCCACTGCCAACGTGTCAGTGGTGGACCTGACCTGCCGTCT
AGAAAAACCTGCCAAATATGATGACATCAAGAAGGTGGTGAAGCAGGCGTCGGAGGGCCCCCTC
AAGGGCATCCTGGGCTACACTGAGCACCAGGTGGTCTCCTCTGACTTCAACAGCGACACCCACT
CCTCCACCTTTGACGCTGGGGCTGGCATTGCCCTCAACGACCACTTTGTCAAGCTCATTTCCTG
GTATGTGGCTGGGGCCAGAGACTGGCTCTTAAAAAGTGCAGGGTCTGGCGCCCTCTGGTGGCTG
GCTCAGAAAAAGGGCCCTGACAACTCTTTACATCTTCTAGGTATGACAACGAGTTCGGATATAG
CAATAGAGTGGTCGATCTGATGGCTCATATGGCTAGCAAAGAGGGAAGCGGAGCTACTAACTTC
AGCCTGCTGAAGCAGGCTGGAGACGTGGAGGAGAACCCTGGACCTATGTGGCAGCTGTTGCTGC
CGACAGCCCTCCTGTTGCTGGTCTCCGCTGGCATGAGAACCGAGGATCTGCCTAAGGCCGTGGT
GTTCCTGGAACCTCAGTGGTACAGAGTGCTGGAAAAGGACAGCGTGACCCTGAAGTGCCAGGGC
GCCTATTCTCCCGAGGACAATAGCACCCAGTGGTTCCACAACGAGAGCCTGATCAGCAGCCAGG
CCAGCAGCTACTTTATCGATGCCGCCACCGTGGACGACAGCGGCGAGTACAGATGCCAGACCAA
TCTGAGCACCCTGAGCGACCCTGTGCAGCTGGAAGTGCACATTGGATGGTTGCTGCTGCAAGCC
CCTAGATGGGTGTTCAAAGAAGAGGACCCCATCCACCTGAGATGCCACTCTTGGAAGAACACAG
CCCTGCACAAAGTGACCTACCTGCAGAACGGCAAGGGCAGAAAGTACTTCCACCACAACAGCGA
CTTCTACATCCCCAAGGCCACACTGAAGGACTCCGGCTCCTACTTCTGCAGAGGCCTGGTCGGC
AGCAAGAACGTGTCCAGCGAGACAGTGAACATCACCATCACACAGGGCCTCGCCGTGTCTACCA
TCAGCAGCTTTTTCCCACCTGGCTATCAGGTGTCCTTCTGCCTGGTCATGGTGCTGCTGTTCGC
CGTGGATACCGGCCTGTACTTCAGCGTCAAGACCAACATCCGGTCCAGCACCAGAGACTGGAAG
GACCACAAGTTCAAGTGGCGGAAGGACCCTCAGGACAAGGGAAGCGGAGCCACAAACTTCTCTC
TGCTGAAGCAGGCAGGAGATGTTGAAGAAAACCCTGGACCTATGGATTGGACCTGGATCCTGTT
TCTGGTGGCCGCTGCCACAAGAGTGCACAGCAATTGGGTCAACGTGATCAGCGACCTGAAGAAG
ATCGAGGACCTGATCCAGAGCATGCACATCGACGCCACACTGTACACCGAGTCCGATGTGCACC
CTAGCTGCAAAGTGACCGCCATGAAGTGCTTTCTGCTGGAACTGCAAGTGATCAGCCTGGAAAG
CGGCGACGCCAGCATCCACGATACCGTGGAAAACCTGATCATCCTGGCCAACAACAGCCTGAGC
AGCAACGGCAATGTGACCGAGAGCGGCTGCAAAGAGTGCGAGGAACTGGAAGAGAAGAACATCA
AAGAGTTCCTCCAGAGCTTCGTCCACATCGTGCAGATGTTCATCAACACCAGCTCTGGCGGAGG
AAGCGGAGGCGGAGGATCTGGTGGTGGTGGATCTGGCGGCGGTGGTAGTGGCGGAGGTTCTCTG
CAAATCACCTGTCCTCCACCTATGAGCGTGGAACACGCCGACATCTGGGTCAAGAGCTACAGCC
TGTACAGCAGAGAGCGGTACATCTGCAACAGCGGCTTCAAGAGAAAGGCCGGCACAAGCAGCCT
GACCGAGTGTGTGCTGAACAAGGCCACAAACGTGGCCCACTGGACCACACCTAGCCTGAAGTGC
ATCAGAGATCCCGCTCTGGTTCATCAGAGGCCTGCCCCTCCATCTACAGTGACAACAGCTGGCG
TGACCCCTCAGCCTGAGTCTCTGTCTCCATCTGGAAAAGAGCCTGCCGCCAGCTCTCCCAGCTC
TAACAATACTGCTGCCACCACAGCCGCTATCGTGCCTGGATCTCAGCTGATGCCTAGCAAGAGC
CCTAGCACCGGCACAACAGAGATCAGCTCTCACGAGAGCAGCCACGGAACACCTTCTCAGACCA
CCGCCAAGAATTGGGAGCTGACAGCCTCTGCCTCTCATCAGCCACCTGGCGTGTACCCACAGGG
CCACTCTGATACAACAGTGGCCATCAGCACCAGCACCGTTCTGCTGTGTGGCCTGTCTGCTGTT
AGCCTGCTGGCCTGCTACCTGAAGTCTAGACAGACACCTCCTCTGGCCAGCGTGGAAATGGAAG
CCATGGAAGCTCTGCCTGTCACATGGGGCACCAGCAGCAGAGATGAGGACCTCGAGAATTGCAG
CCACCACCTGTAAGCGGCCGCGTCGAGTCTAGAGGGCCCGTTTAAACCCGCTGATCAGCCTCGA
CTGTGCCTTCTAGTTGCCAGCCATCTGTTGTTTGCCCCTCCCCCGTGCCTTCCTTGACCCTGGA
AGGTGCCACTCCCACTGTCCTTTCCTAATAAAATGAGGAAATTGCATCGCATTGTCTGAGTAGG
TGTCATTCTATTCTGGGGGGTGGGGTGGGGCAGGACAGCAAGGGGGAGGATTGGGAAGACAATA
GCAGGCATGCTGGGGATGCGGTGGGCTCTATGGATTTGGCTACAGCAACAGGGTGGTGGACCTC
ATGGCCCACATGGCCTCCAAGGAGTAAGACCCCTGGACCACCAGCCCCAGCAAGAGCACAAGAG
GAAGAGAGAGACCCTCACTGCTGGGGAGTCCCTGCCACACTCAGTCCCCCACCACACTGAATCT
CCCCTCCTCACAGTTGCCATGTAGACCCCTTGAAGAGGGGAGGGGCCTAGGGAGCCGCACCTTG
TCATGTACCATCAATAAAGTACCCTGTGCTCAACCAGTTACTTGTCCTGTCTTATTCTAGGGTC
TGGGGCAGAGGGGAGGGAAGCTGGGCTTGTGTCAAGGTGAGACATTCTTGCTGGGGAGGGACCT
GGTATGTTCTCCTCAGACTGAGGGTAGGGCCTCCAAACAGCCTTGCTTGCTTCGAGAACCATTT
GCTTCCCGCTCAGACGTCTTGAGTGCTACAGGAAGCTGGCACCACTACTTCAGAGAACAAGGCC
TTTTCCTCTCCTCGCTCCAGT
exemplary donor template for insertion at GAPDH locus
SEQ ID NO: 214
GAAGACTGTGGATGGCCCCTCCGGGAAACTGTGGCGTGATGGCCGCGGGGCTCTCCAGAACATC
ATCCCTGCCTCTACTGGCGCTGCCAAGGCTGTGGGCAAGGTCATCCCTGAGCTGAACGGGAAGC
TCACTGGCATGGCCTTCCGTGTCCCCACTGCCAACGTGTCAGTGGTGGACCTGACCTGCCGTCT
AGAAAAACCTGCCAAATATGATGACATCAAGAAGGTGGTGAAGCAGGCGTCGGAGGGCCCCCTC
AAGGGCATCCTGGGCTACACTGAGCACCAGGTGGTCTCCTCTGACTTCAACAGCGACACCCACT
CCTCCACCTTTGACGCTGGGGCTGGCATTGCCCTCAACGACCACTTTGTCAAGCTCATTTCCTG
GTATGTGGCTGGGGCCAGAGACTGGCTCTTAAAAAGTGCAGGGTCTGGCGCCCTCTGGTGGCTG
GCTCAGAAAAAGGGCCCTGACAACTCTTTACATCTTCTAGGTATGACAACGAGTTCGGATATAG
CAATAGAGTGGTCGATCTGATGGCTCATATGGCTAGCAAAGAGGGAAGCGGAGCTACTAACTTC
AGCCTGCTGAAGCAGGCTGGAGACGTGGAGGAGAACCCTGGACCTATGTCAAATATTACAGATC
CACAGATGTGGGATTTTGATGATCTAAATTTCACTGGCATGCCACCTGCAGATGAAGATTACAG
CCCCTGTATGCTAGAAACTGAGACACTCAACAAGTATGTTGTGATCATCGCCTATGCCCTAGTG
TTCCTGCTGAGCCTGCTGGGAAACTCCCTGGTGATGCTGGTCATCTTATACAGCAGGGTCGGCC
GCTCCGTCACTGATGTCTACCTGCTGAACCTGGCCTTGGCCGACCTACTCTTTGCCCTGACCTT
GCCCATCTGGGCCGCCTCCAAGGTGAATGGCTGGATTTTTGGCACATTCCTGTGCAAGGTGGTC
TCACTCCTGAAGGAAGTCAACTTCTACAGTGGCATCCTGCTGTTGGCCTGCATCAGTGTGGACC
GTTACCTGGCCATTGTCCATGCCACACGCACACTGACCCAGAAGCGTCACTTGGTCAAGTTTGT
TTGTCTTGGCTGCTGGGGACTGTCTATGAATCTGTCCCTGCCCTTCTTCCTTTTCCGCCAGGCT
TACCATCCAAACAATTCCAGTCCAGTTTGCTATGAGGTCCTGGGAAATGACACAGCAAAATGGC
GGATGGTGTTGCGGATCCTGCCTCACACCTTTGGCTTCATCGTGCCGCTGTTTGTCATGCTGTT
CTGCTATGGATTCACCCTGCGTACACTGTTTAAGGCCCACATGGGGCAGAAGCACCGAGCCATG
AGGGTCATCTTTGCTGTCGTCCTCATCTTCCTGCTTTGCTGGCTGCCCTACAACCTGGTCCTGC
TGGCAGACACCCTCATGAGGACCCAGGTGATCCAGGAGAGCTGTGAGCGCCGCAACAACATCGG
CCGGGCCCTGGATGCCACTGAGATTCTGGGATTTCTCCATAGCTGCCTCAACCCCATCATCTAC
GCCTTCATCGGCCAAAATTTTCGCCATGGATTCCTCAAGATCCTGGCTATGCATGGCCTGGTCA
GCAAGGAGTTCTTGGCACGTCATCGTGTTACCTCCTACACTTCTTCGTCTGTCAATGTCTCTTC
CAACCTCTGAATTTGGCTACAGCAACAGGGTGGTGGACCTCATGGCCCACATGGCCTCCAAGGA
GTAAGACCCCTGGACCACCAGCCCCAGCAAGAGCACAAGAGGAAGAGAGAGACCCTCACTGCTG
GGGAGTCCCTGCCACACTCAGTCCCCCACCACACTGAATCTCCCCTCCTCACAGTTGCCATGTA
GACCCCTTGAAGAGGGGAGGGGCCTAGGGAGCCGCACCTTGTCATGTACCATCAATAAAGTACC
CTGTGCTCAACCAGTTACTTGTCCTGTCTTATTCTAGGGTCTGGGGCAGAGGGGAGGGAAGCTG
GGCTTGTGTCAAGGTGAGACATTCTTGCTGGGGAGGGACCTGGTATGTTCTCCTCAGACTGAGG
GTAGGGCCTCCAAACAGCCTTGCTTGCTTCGAGAACCATTTGCTTCCCGCTCAGACGTCTTGAG
TGCTACAGGAAGCTGGCACCACTACTTCAGAGAACAAGGCCTTTTCCTCTCCTCGCTCCAGT
exemplary donor template for insertion at GAPDH locus
SEQ ID NO: 215
GAAGACTGTGGATGGCCCCTCCGGGAAACTGTGGCGTGATGGCCGCGGGGCTCTCCAGAACATC
ATCCCTGCCTCTACTGGCGCTGCCAAGGCTGTGGGCAAGGTCATCCCTGAGCTGAACGGGAAGC
TCACTGGCATGGCCTTCCGTGTCCCCACTGCCAACGTGTCAGTGGTGGACCTGACCTGCCGTCT
AGAAAAACCTGCCAAATATGATGACATCAAGAAGGTGGTGAAGCAGGCGTCGGAGGGCCCCCTC
AAGGGCATCCTGGGCTACACTGAGCACCAGGTGGTCTCCTCTGACTTCAACAGCGACACCCACT
CCTCCACCTTTGACGCTGGGGCTGGCATTGCCCTCAACGACCACTTTGTCAAGCTCATTTCCTG
GTATGTGGCTGGGGCCAGAGACTGGCTCTTAAAAAGTGCAGGGTCTGGCGCCCTCTGGTGGCTG
GCTCAGAAAAAGGGCCCTGACAACTCTTTACATCTTCTAGGTATGACAACGAGTTCGGATATAG
CAATAGAGTGGTCGATCTGATGGCTCATATGGCTAGCAAAGAGGGAAGCGGAGCTACTAACTTC
AGCCTGCTGAAGCAGGCTGGAGACGTGGAGGAGAACCCTGGACCTATGGAGTTGAGGAAGTACG
GCCCTGGAAGACTGGCGGGGACAGTTATAGGAGGAGCTGCTCAGAGTAAATCACAGACTAAATC
AGACTCAATCACAAAAGAGTTCCTGCCAGGCCTTTACACAGCCCCTTCCTCCCCGTTCCCGCCC
TCACAGGTGAGTGACCACCAAGTGCTAAATGACGCCGAGGTTGCCGCCCTCCTGGAGAACTTCA
GCTCTTCCTATGACTATGGAGAAAACGAGAGTGACTCGTGCTGTACCTCCCCGCCCTGCCCACA
GGACTTCAGCCTGAACTTCGACCGGGCCTTCCTGCCAGCCCTCTACAGCCTCCTCTTTCTGCTG
GGGCTGCTGGGCAACGGCGCGGTGGCAGCCGTGCTGCTGAGCCGGCGGACAGCCCTGAGCAGCA
CCGACACCTTCCTGCTCCACCTAGCTGTAGCAGACACGCTGCTGGTGCTGACACTGCCGCTCTG
GGCAGTGGACGCTGCCGTCCAGTGGGTCTTTGGCTCTGGCCTCTGCAAAGTGGCAGGTGCCCTC
TTCAACATCAACTTCTACGCAGGAGCCCTCCTGCTGGCCTGCATCAGCTTTGACCGCTACCTGA
ACATAGTTCATGCCACCCAGCTCTACCGCCGGGGGCCCCCGGCCCGCGTGACCCTCACCTGCCT
GGCTGTCTGGGGGCTCTGCCTGCTTTTCGCCCTCCCAGACTTCATCTTCCTGTCGGCCCACCAC
GACGAGCGCCTCAACGCCACCCACTGCCAATACAACTTCCCACAGGTGGGCCGCACGGCTCTGC
GGGTGCTGCAGCTGGTGGCTGGCTTTCTGCTGCCCCTGCTGGTCATGGCCTACTGCTATGCCCA
CATCCTGGCCGTGCTGCTGGTTTCCAGGGGCCAGCGGCGCCTGCGGGCCATGCGGCTGGTGGTG
GTGGTCGTGGTGGCCTTTGCCCTCTGCTGGACCCCCTATCACCTGGTGGTGCTGGTGGACATCC
TCATGGACCTGGGCGCTTTGGCCCGCAACTGTGGCCGAGAAAGCAGGGTAGACGTGGCCAAGTC
GGTCACCTCAGGCCTGGGCTACATGCACTGCTGCCTCAACCCGCTGCTCTATGCCTTTGTAGGG
GTCAAGTTCCGGGAGCGGATGTGGATGCTGCTCTTGCGCCTGGGCTGCCCCAACCAGAGAGGGC
TCCAGAGGCAGCCATCGTCTTCCCGCCGGGATTCATCCTGGTCTGAGACCTCAGAGGCCTCCTA
CTCGGGCTTGTGAATTTGGCTACAGCAACAGGGTGGTGGACCTCATGGCCCACATGGCCTCCAA
GGAGTAAGACCCCTGGACCACCAGCCCCAGCAAGAGCACAAGAGGAAGAGAGAGACCCTCACTG
CTGGGGAGTCCCTGCCACACTCAGTCCCCCACCACACTGAATCTCCCCTCCTCACAGTTGCCAT
GTAGACCCCTTGAAGAGGGGAGGGGCCTAGGGAGCCGCACCTTGTCATGTACCATCAATAAAGT
ACCCTGTGCTCAACCAGTTACTTGTCCTGTCTTATTCTAGGGTCTGGGGCAGAGGGGAGGGAAG
CTGGGCTTGTGTCAAGGTGAGACATTCTTGCTGGGGAGGGACCTGGTATGTTCTCCTCAGACTG
AGGGTAGGGCCTCCAAACAGCCTTGCTTGCTTCGAGAACCATTTGCTTCCCGCTCAGACGTCTT
GAGTGCTACAGGAAGCTGGCACCACTACTTCAGAGAACAAGGCCTTTTCCTCTCCTCGCTCCAG
T
exemplary donor template for insertion at GAPDH locus
SEQ ID NO: 216
GAAGACTGTGGATGGCCCCTCCGGGAAACTGTGGCGTGATGGCCGCGGGGCTCTCCAGAACATC
ATCCCTGCCTCTACTGGCGCTGCCAAGGCTGTGGGCAAGGTCATCCCTGAGCTGAACGGGAAGC
TCACTGGCATGGCCTTCCGTGTCCCCACTGCCAACGTGTCAGTGGTGGACCTGACCTGCCGTCT
AGAAAAACCTGCCAAATATGATGACATCAAGAAGGTGGTGAAGCAGGCGTCGGAGGGCCCCCTC
AAGGGCATCCTGGGCTACACTGAGCACCAGGTGGTCTCCTCTGACTTCAACAGCGACACCCACT
CCTCCACCTTTGACGCTGGGGCTGGCATTGCCCTCAACGACCACTTTGTCAAGCTCATTTCCTG
GTATGTGGCTGGGGCCAGAGACTGGCTCTTAAAAAGTGCAGGGTCTGGCGCCCTCTGGTGGCTG
GCTCAGAAAAAGGGCCCTGACAACTCTTTACATCTTCTAGGTATGACAACGAGTTCGGATATAG
CAATAGAGTGGTCGATCTGATGGCTCATATGGCTAGCAAAGAGGGAAGCGGAGCTACTAACTTC
AGCCTGCTGAAGCAGGCTGGAGACGTGGAGGAGAACCCTGGACCTATGGTCCTTGAGGTGAGTG
ACCACCAAGTGCTAAATGACGCCGAGGTTGCCGCCCTCCTGGAGAACTTCAGCTCTTCCTATGA
CTATGGAGAAAACGAGAGTGACTCGTGCTGTACCTCCCCGCCCTGCCCACAGGACTTCAGCCTG
AACTTCGACCGGGCCTTCCTGCCAGCCCTCTACAGCCTCCTCTTTCTGCTGGGGCTGCTGGGCA
ACGGCGCGGTGGCAGCCGTGCTGCTGAGCCGGCGGACAGCCCTGAGCAGCACCGACACCTTCCT
GCTCCACCTAGCTGTAGCAGACACGCTGCTGGTGCTGACACTGCCGCTCTGGGCAGTGGACGCT
GCCGTCCAGTGGGTCTTTGGCTCTGGCCTCTGCAAAGTGGCAGGTGCCCTCTTCAACATCAACT
TCTACGCAGGAGCCCTCCTGCTGGCCTGCATCAGCTTTGACCGCTACCTGAACATAGTTCATGC
CACCCAGCTCTACCGCCGGGGGCCCCCGGCCCGCGTGACCCTCACCTGCCTGGCTGTCTGGGGG
CTCTGCCTGCTTTTCGCCCTCCCAGACTTCATCTTCCTGTCGGCCCACCACGACGAGCGCCTCA
ACGCCACCCACTGCCAATACAACTTCCCACAGGTGGGCCGCACGGCTCTGCGGGTGCTGCAGCT
GGTGGCTGGCTTTCTGCTGCCCCTGCTGGTCATGGCCTACTGCTATGCCCACATCCTGGCCGTG
CTGCTGGTTTCCAGGGGCCAGCGGCGCCTGCGGGCCATGCGGCTGGTGGTGGTGGTCGTGGTGG
CCTTTGCCCTCTGCTGGACCCCCTATCACCTGGTGGTGCTGGTGGACATCCTCATGGACCTGGG
CGCTTTGGCCCGCAACTGTGGCCGAGAAAGCAGGGTAGACGTGGCCAAGTCGGTCACCTCAGGC
CTGGGCTACATGCACTGCTGCCTCAACCCGCTGCTCTATGCCTTTGTAGGGGTCAAGTTCCGGG
AGCGGATGTGGATGCTGCTCTTGCGCCTGGGCTGCCCCAACCAGAGAGGGCTCCAGAGGCAGCC
ATCGTCTTCCCGCCGGGATTCATCCTGGTCTGAGACCTCAGAGGCCTCCTACTCGGGCTTGTGA
ATTTGGCTACAGCAACAGGGTGGTGGACCTCATGGCCCACATGGCCTCCAAGGAGTAAGACCCC
TGGACCACCAGCCCCAGCAAGAGCACAAGAGGAAGAGAGAGACCCTCACTGCTGGGGAGTCCCT
GCCACACTCAGTCCCCCACCACACTGAATCTCCCCTCCTCACAGTTGCCATGTAGACCCCTTGA
AGAGGGGAGGGGCCTAGGGAGCCGCACCTTGTCATGTACCATCAATAAAGTACCCTGTGCTCAA
CCAGTTACTTGTCCTGTCTTATTCTAGGGTCTGGGGCAGAGGGGAGGGAAGCTGGGCTTGTGTC
AAGGTGAGACATTCTTGCTGGGGAGGGACCTGGTATGTTCTCCTCAGACTGAGGGTAGGGCCTC
CAAACAGCCTTGCTTGCTTCGAGAACCATTTGCTTCCCGCTCAGACGTCTTGAGTGCTACAGGA
AGCTGGCACCACTACTTCAGAGAACAAGGCCTTTTCCTCTCCTCGCTCCAGT
exemplary donor template for insertion at GAPDH locus
SEQ ID NO: 217
GAAGACTGTGGATGGCCCCTCCGGGAAACTGTGGCGTGATGGCCGCGGGGCTCTCCAGAACATC
ATCCCTGCCTCTACTGGCGCTGCCAAGGCTGTGGGCAAGGTCATCCCTGAGCTGAACGGGAAGC
TCACTGGCATGGCCTTCCGTGTCCCCACTGCCAACGTGTCAGTGGTGGACCTGACCTGCCGTCT
AGAAAAACCTGCCAAATATGATGACATCAAGAAGGTGGTGAAGCAGGCGTCGGAGGGCCCCCTC
AAGGGCATCCTGGGCTACACTGAGCACCAGGTGGTCTCCTCTGACTTCAACAGCGACACCCACT
CCTCCACCTTTGACGCTGGGGCTGGCATTGCCCTCAACGACCACTTTGTCAAGCTCATTTCCTG
GTATGTGGCTGGGGCCAGAGACTGGCTCTTAAAAAGTGCAGGGTCTGGCGCCCTCTGGTGGCTG
GCTCAGAAAAAGGGCCCTGACAACTCTTTACATCTTCTAGGTATGACAACGAGTTCGGATATAG
CAATAGAGTGGTCGATCTGATGGCTCATATGGCTAGCAAAGAGGGAAGCGGAGCTACTAACTTC
AGCCTGCTGAAGCAGGCTGGAGACGTGGAGGAGAACCCTGGACCTATGGATTATCAAGTGTCAA
GTCCAATCTATGAGATCAATTATTATACATCGGAGCCCTGCCAAAAAATCAATGTGAAGCAAAT
CGCAGCCCGCCTCCTGCCTCCGCTCTACTCACTGGTGTTCATCTTTGGTTTTGTGGGCAACATG
CTGGTCATCCTCATCCTGATAAACTGCAAAAGGCTGAAGAGCATGACTGACATCTACCTGCTCA
ACCTGGCCATCTCTGACCTGTTTTTCCTTCTTACTGTCCCCTTCTGGGCTCACTATGCTGCCGC
CCAGTGGGACTTTGGAAATACAATGTGTCAACTCTTGACAGGGCTCTATTTTATAGGCTTCTTC
TCTGGAATCTTCTTCATCATCCTCCTGACAATCGATAGGTACCTGGCTGTCGTCCATGCTGTGT
TTGCTTTAAAAGCCAGGACGGTCACCTTTGGGGTGGTGACAAGTGTGATCACTTGGGTGGTGGC
TGTGTTTGCGTCTCTCCCAGGAATCATCTTTACCAGATCTCAAAAAGAAGGTCTTCATTACACC
TGGAGCTCTCATTTTCCATACAGTCAGTATCAATTCTGGAAGAATTTCCAGACATTAAAGATAG
TCATCTTGGGGCTGGTCCTGCCGCTGCTTGTCATGGTCATCTGCTACTCGGGAATCCTAAAAAC
TCTGCTTCGGTGTCGAAATGAGAAGAAGAGGCACAGGGCTGTGAGGCTTATCTTCACCATCATG
ATTGTTTATTTTCTCTTCTGGGCTCCCTACAACATTGTCCTTCTCCTGAACACCTTCCAGGAAT
TCTTTGGCCTGAATAATTGCAGTAGCTCTAACAGGTTGGACCAAGCTATGCAGGTGACAGAGAC
TCTTGGGATGACGCACTGCTGCATCAACCCCATCATCTATGCCTTTGTCGGGGAGAAGTTCAGA
AACTACCTCTTAGTCTTCTTCCAAAAGCACATTGCCAAACGCTTCTGCAAATGCTGTTCTATTT
TCCAGCAAGAGGCTCCCGAGCGAGCAAGCTCAGTTTACACCCGATCCACTGGGGAGCAGGAAAT
ATCTGTGGGCTTGTGAATTTGGCTACAGCAACAGGGTGGTGGACCTCATGGCCCACATGGCCTC
CAAGGAGTAAGACCCCTGGACCACCAGCCCCAGCAAGAGCACAAGAGGAAGAGAGAGACCCTCA
CTGCTGGGGAGTCCCTGCCACACTCAGTCCCCCACCACACTGAATCTCCCCTCCTCACAGTTGC
CATGTAGACCCCTTGAAGAGGGGAGGGGCCTAGGGAGCCGCACCTTGTCATGTACCATCAATAA
AGTACCCTGTGCTCAACCAGTTACTTGTCCTGTCTTATTCTAGGGTCTGGGGCAGAGGGGAGGG
AAGCTGGGCTTGTGTCAAGGTGAGACATTCTTGCTGGGGAGGGACCTGGTATGTTCTCCTCAGA
CTGAGGGTAGGGCCTCCAAACAGCCTTGCTTGCTTCGAGAACCATTTGCTTCCCGCTCAGACGT
CTTGAGTGCTACAGGAAGCTGGCACCACTACTTCAGAGAACAAGGCCTTTTCCTCTCCTCGCTC
CAGT
exemplary donor template for insertion at GAPDH locus
SEQ ID NO: 218
GAAGACTGTGGATGGCCCCTCCGGGAAACTGTGGCGTGATGGCCGCGGGGCTCTCCAGAACATC
ATCCCTGCCTCTACTGGCGCTGCCAAGGCTGTGGGCAAGGTCATCCCTGAGCTGAACGGGAAGC
TCACTGGCATGGCCTTCCGTGTCCCCACTGCCAACGTGTCAGTGGTGGACCTGACCTGCCGTCT
AGAAAAACCTGCCAAATATGATGACATCAAGAAGGTGGTGAAGCAGGCGTCGGAGGGCCCCCTC
AAGGGCATCCTGGGCTACACTGAGCACCAGGTGGTCTCCTCTGACTTCAACAGCGACACCCACT
CCTCCACCTTTGACGCTGGGGCTGGCATTGCCCTCAACGACCACTTTGTCAAGCTCATTTCCTG
GTATGTGGCTGGGGCCAGAGACTGGCTCTTAAAAAGTGCAGGGTCTGGCGCCCTCTGGTGGCTG
GCTCAGAAAAAGGGCCCTGACAACTCTTTACATCTTCTAGGTATGACAACGAGTTCGGATATAG
CAATAGAGTGGTCGATCTGATGGCTCATATGGCTAGCAAAGAGGGAAGCGGAGCTACTAACTTC
AGCCTGCTGAAGCAGGCTGGAGACGTGGAGGAGAACCCTGGACCTATGCTGTCCACATCTCGTT
CTCGGTTTATCAGAAATACCAACGAGAGCGGTGAAGAAGTCACCACCTTTTTTGATTATGATTA
CGGTGCTCCCTGTCATAAATTTGACGTGAAGCAAATTGGGGCCCAACTCCTGCCTCCGCTCTAC
TCGCTGGTGTTCATCTTTGGTTTTGTGGGCAACATGCTGGTCGTCCTCATCTTAATAAACTGCA
AAAAGCTGAAGTGCTTGACTGACATTTACCTGCTCAACCTGGCCATCTCTGATCTGCTTTTTCT
TATTACTCTCCCATTGTGGGCTCACTCTGCTGCAAATGAGTGGGTCTTTGGGAATGCAATGTGC
AAATTATTCACAGGGCTGTATCACATCGGTTATTTTGGCGGAATCTTCTTCATCATCCTCCTGA
CAATCGATAGATACCTGGCTATTGTCCATGCTGTGTTTGCTTTAAAAGCCAGGACGGTCACCTT
TGGGGTGGTGACAAGTGTGATCACCTGGTTGGTGGCTGTGTTTGCTTCTGTCCCAGGAATCATC
TTTACTAAATGCCAGAAAGAAGATTCTGTTTATGTCTGTGGCCCTTATTTTCCACGAGGATGGA
ATAATTTCCACACAATAATGAGGAACATTTTGGGGCTGGTCCTGCCGCTGCTCATCATGGTCAT
CTGCTACTCGGGAATCCTGAAAACCCTGCTTCGGTGTCGAAACGAGAAGAAGAGGCATAGGGCA
GTGAGAGTCATCTTCACCATCATGATTGTTTACTTTCTCTTCTGGACTCCCTATAATATTGTCA
TTCTCCTGAACACCTTCCAGGAATTCTTCGGCCTGAGTAACTGTGAAAGCACCAGTCAACTGGA
CCAAGCCACGCAGGTGACAGAGACTCTTGGGATGACTCACTGCTGCATCAATCCCATCATCTAT
GCCTTCGTTGGGGAGAAGTTCAGAAGCCTTTTTCACATAGCTCTTGGCTGTAGGATTGCCCCAC
TCCAAAAACGAGTGTGTGGAGGTCGAGGAGTGAGACGAGGAAAGAATGTGAAAGTGAGTAGACA
AGGACTCCTCGATGGTCGTGGAAAAGGAAAGTCAATTGGCAGAGCCCCTGAAGCCAGTCTTCAG
GACAAAGAAGGAGCCTAGATTTGGCTACAGCAACAGGGTGGTGGACCTCATGGCCCACATGGCC
TCCAAGGAGTAAGACCCCTGGACCACCAGCCCCAGCAAGAGCACAAGAGGAAGAGAGAGACCCT
CACTGCTGGGGAGTCCCTGCCACACTCAGTCCCCCACCACACTGAATCTCCCCTCCTCACAGTT
GCCATGTAGACCCCTTGAAGAGGGGAGGGGCCTAGGGAGCCGCACCTTGTCATGTACCATCAAT
AAAGTACCCTGTGCTCAACCAGTTACTTGTCCTGTCTTATTCTAGGGTCTGGGGCAGAGGGGAG
GGAAGCTGGGCTTGTGTCAAGGTGAGACATTCTTGCTGGGGAGGGACCTGGTATGTTCTCCTCA
GACTGAGGGTAGGGCCTCCAAACAGCCTTGCTTGCTTCGAGAACCATTTGCTTCCCGCTCAGAC
GTCTTGAGTGCTACAGGAAGCTGGCACCACTACTTCAGAGAACAAGGCCTTTTCCTCTCCTCGC
TCCAGT

### Nuclease

[0670] Any nuclease that causes a break within an endogenous coding sequence of an essential gene of the cell can be used in the methods of the present disclosure. In some embodiments the nuclease is a DNA nuclease. In some embodiments the nuclease causes a single-strand break (SSB) within an endogenous coding sequence of an essential gene of the cell, e.g., in a “prime editing” system. In some embodiments the nuclease causes a double-strand break (DSB) within an endogenous coding sequence of an essential gene of the cell. In some embodiments the double-strand break is caused by a single nuclease. In some embodiments the double-strand break is caused by two nucleases that each cause a single-strand break on opposing strands, e.g., a dual “nickase” system. In some embodiments the nuclease is a CRISPR/Cas nuclease and the method further comprises contacting the cell with one or more guide molecules for the CRISPR/Cas nuclease. Exemplary CRISPR/Cas nucleases and guide molecules are described in more detail herein. It is to be understood that the nuclease (including a nickase) is not limited in any manner and can also be a zinc finger nuclease (ZFN), a transcription activator-like effector nuclease (TALEN), a meganuclease, or other nuclease known in the art (or a combination thereof). Methods for designing zinc finger nucleases (ZFNs) are well known in the art, e.g., see Urnov et al., Nature Reviews Genetics 2010; 11:636-640 and Paschon et al., Nat. Commun. 2019; 10(1):1133 and references cited therein. Methods for designing transcription activator-like effector nucleases (TALENs) are well known in the art, e.g., see Joung and Sander, Nat. Rev. Mol. Cell Biol. 2013; 14(1):49-55 and references cited therein. Methods for designing meganucleases are also well known in the art, e.g., see Silva et al., Curr. Gene Ther. 2011; 11(1):11-27 and Redel and Prather, Toxicol. Pathol. 2016; 44(3):428-433.

[0671] In some embodiments, a nuclease suitable for methods described herein can have an editing efficiency that is greater than about 50%. In some embodiments, a nuclease suitable for methods described herein can have an editing efficiency that is greater than about 55%. In some embodiments, a nuclease suitable for methods described herein can have an editing efficiency that is greater than about 60%. In some embodiments, a nuclease suitable for methods described herein can have an editing efficiency that is greater than about 65%. In some embodiments, a nuclease suitable for methods described herein can have an editing efficiency that is greater than about 70%. In some embodiments, a nuclease suitable for methods described herein can have an editing efficiency that is greater than about 75%. In some embodiments, a nuclease suitable for methods described herein can have an editing efficiency that is greater than about 80%. In some embodiments, a nuclease suitable for methods described herein can have an editing efficiency that is greater than about 85%. In some embodiments, a nuclease suitable for methods described herein can have an editing efficiency that is greater than about 90%. In some embodiments, a nuclease suitable for methods described herein can have an editing efficiency that is greater than about 95%. In some embodiments, a nuclease suitable for methods described herein can have an editing efficiency that is greater than about 96%. In some embodiments, a nuclease suitable for methods described herein can have an editing efficiency that is greater than about 97%. In some embodiments, a nuclease suitable for methods described herein can have an editing efficiency that is greater than about 98%. In some embodiments, a nuclease suitable for methods described herein can have an editing efficiency that is greater than about 99%.

[0672] In general, the nuclease can be delivered to the cell as a protein or a nucleic acid encoding the protein, e.g., a DNA molecule or mRNA molecule. The protein or nucleic acid can be combined with other delivery agents, e.g., lipids or polymers in a lipid or polymer nanoparticle and targeting agents such as antibodies or other binding agents with specificity for the cell. The DNA molecule can be a nucleic acid vector, such as a viral genome or circular double-stranded DNA, e.g., a plasmid. Nucleic acid vectors encoding a nuclease can include other coding or non-coding elements. For example, a nuclease can be delivered as part of a viral genome (e.g., in an AAV, adenoviral or lentiviral genome) that includes certain genomic backbone elements (e.g., inverted terminal repeats, in the case of an AAV genome).

[0673] A CRISPR/Cas nuclease can be delivered to the cell as a protein or a nucleic acid encoding the protein, e.g., a DNA molecule or mRNA molecule. The guide molecule can be delivered as an RNA molecule or encoded by a DNA molecule. A CRISPR/Cas nuclease can also be delivered with a guide molecule as a ribonucleoprotein (RNP) and introduced into the cell via nucleofection (electroporation).

[0674] CRISPR/Cas Nucleases

[0675] CRISPR/Cas nucleases according to the present disclosure include, but are not limited to, naturally-occurring Class 2 CRISPR nucleases such as Cas9, and Cpf1 (Cas12a), as well as other Cas12 nucleases and nucleases derived or obtained therefrom. In functional terms, CRISPR/Cas nucleases are defined as those nucleases that: (a) interact with (e.g., complex with) a gRNA; and (b) together with the gRNA, associate with, and optionally cleave or modify, a target region of a DNA that includes (i) a sequence complementary to the targeting domain of the gRNA and, optionally, (ii) an additional sequence referred to as a “protospacer adjacent motif,” or “PAM,” which is described in greater detail below. As the following examples will illustrate, CRISPR/Cas nucleases can be defined, in broad terms, by their PAM specificity and cleavage activity, even though variations may exist between individual CRISPR/Cas nucleases that share the same PAM specificity or cleavage activity. Skilled artisans will appreciate that some aspects of the present disclosure relate to systems and methods that can be implemented using any suitable CRISPR/Cas nuclease having a certain PAM specificity and/or cleavage activity. For this reason, unless otherwise specified, the term CRISPR/Cas nuclease should be understood as a generic term, and not limited to any particular type (e.g., Cas9 vs. Cpf1), species (e.g., S. pyogenes vs. S. aureus) or variation (e.g., full-length vs. truncated or split; naturally-occurring PAM specificity vs. engineered PAM specificity, etc.) of CRISPR/Cas nuclease.

[0676] The PAM sequence takes its name from its sequential relationship to the “protospacer” sequence that is complementary to gRNA targeting domains (or “spacers”). Together with protospacer sequences, PAM sequences define target regions or sequences for specific CRISPR/Cas nuclease and gRNA combinations.

[0677] Various CRISPR/Cas nucleases may require different sequential relationships between PAMs and protospacers. In general, Cas9s recognize PAM sequences that are 3′ of the protospacer. Cpf1 (Cas12a), on the other hand, generally recognizes PAM sequences that are 5′ of the protospacer.

[0678] In addition to recognizing specific sequential orientations of PAMs and protospacers, CRISPR/Cas nucleases can also recognize specific PAM sequences. S. aureus Cas9, for instance, recognizes a PAM sequence of NNGRRT or NNGRRV, wherein the N residues are immediately 3′ of the region recognized by the gRNA targeting domain. S. pyogenes Cas9 recognizes NGG PAM sequences. F. novicida Cpf1 recognizes a TTN PAM sequence. PAM sequences have been identified for a variety of CRISPR/Cas nucleases, and a strategy for identifying novel PAM sequences has been described by Shmakov et al., Molecular Cell 2015; 60:385-397. It should also be noted that engineered CRISPR/Cas nucleases can have PAM specificities that differ from the PAM specificities of reference molecules (for instance, in the case of an engineered CRISPR/Cas nuclease, the reference molecule may be the naturally occurring variant from which the CRISPR/Cas nuclease is derived, or the naturally occurring variant having the greatest amino acid sequence homology to the engineered CRISPR/Cas nuclease).

[0679] In addition to their PAM specificity, CRISPR/Cas nucleases can be characterized by their DNA cleavage activity: naturally-occurring CRISPR/Cas nucleases typically form double-strand breaks (DSBs) in target nucleic acids, but engineered variants called “nickases” have been produced that generate only single-strand breaks (SSBs), e.g., those discussed in Ran et al., Cell 2013; 154(6):1380-1389 (“Ran”), or that that do not cut at all.

[0680] Cas9

[0681] Crystal structures have been determined for S. pyogenes Cas9 (Jinek et al., Science 2014; 343(6176):1247997 (“Jinek 2014”), and for S. aureus Cas9 in complex with a unimolecular guide RNA and a target DNA. See Nishimasu et al., Cell 1024; 156:935-949 (“Nishimasu 2014”); Nishimasu et al., Cell 2015; 162:1113-1126 (“Nishimasu 2015”); and Anders et al., Nature 2014; 513(7519):569-73 (“Anders 2014”).

[0682] A naturally occurring Cas9 protein comprises two lobes: a recognition (REC) lobe and a nuclease (NUC) lobe; each of which comprise particular structural and/or functional domains. The REC lobe comprises an arginine-rich bridge helix (BH) domain, and at least one REC domain (e.g., a REC1 domain and, optionally, a REC2 domain). The REC lobe does not share structural similarity with other known proteins, indicating that it is a unique functional domain. While not wishing to be bound by any theory, mutational analyses suggest specific functional roles for the BH and REC domains: the BH domain appears to play a role in gRNA:DNA recognition, while the REC domain is thought to interact with the repeat:anti-repeat duplex of the gRNA and to mediate the formation of the Cas9/gRNA complex.

[0683] The NUC lobe comprises a RuvC domain, an HNH domain, and a PAM-interacting (PI) domain. The RuvC domain shares structural similarity to retroviral integrase superfamily members and cleaves the non-complementary (i.e., bottom) strand of the target nucleic acid. It may be formed from two or more split RuvC motifs (such as RuvC I, RuvCII, and RuvCIII in S. pyogenes and S. aureus). The HNH domain, meanwhile, is structurally similar to HNN endonuclease motifs, and cleaves the complementary (i.e., top) strand of the target nucleic acid. The PI domain, as its name suggests, contributes to PAM specificity.

[0684] While certain functions of Cas9 are linked to (but not necessarily fully determined by) the specific domains set forth above, these and other functions may be mediated or influenced by other Cas9 domains, or by multiple domains on either lobe. For instance, in S. pyogenes Cas9, as described in Nishimasu 2014, the repeat:antirepeat duplex of the gRNA falls into a groove between the REC and NUC lobes, and nucleotides in the duplex interact with amino acids in the BH, PI, and REC domains. Some nucleotides in the first stem loop structure also interact with amino acids in multiple domains (PI, BH and REC1), as do some nucleotides in the second and third stem loops (RuvC and PI domains).

[0685] Cpf1

[0686] The crystal structure of Acidaminococcus sp. Cpf1 in complex with crRNA and a dsDNA target including a TTTN PAM sequence has been solved by Yamano et al., Cell. 2016; 165(4):949-962 (“Yamano”). Cpf1, like Cas9, has two lobes: a REC (recognition) lobe, and a NUC (nuclease) lobe. The REC lobe includes REC1 and REC2 domains, which lack similarity to any known protein structures. The NUC lobe, meanwhile, includes three RuvC domains (RuvC-I, -II and -III) and a BH domain. However, in contrast to Cas9, the Cpf1 REC lobe lacks an HNH domain, and includes other domains that also lack similarity to known protein structures: a structurally unique PI domain, three Wedge (WED) domains (WED-I, —II and —III), and a nuclease (Nuc) domain.

[0687] While Cas9 and Cpf1 share similarities in structure and function, it should be appreciated that certain Cpf1 activities are mediated by structural domains that are not analogous to any Cas9 domains. For instance, cleavage of the complementary strand of the target DNA appears to be mediated by the Nuc domain, which differs sequentially and spatially from the HNH domain of Cas9. Additionally, the non-targeting portion of Cpf1 gRNA (the handle) adopts a pseudoknot structure, rather than a stem loop structure formed by the repeat:antirepeat duplex in Cas9 gRNAs.

[0688] Nuclease Variants

[0689] The CRISPR/Cas nucleases described herein have activities and properties that can be useful in a variety of applications, but the skilled artisan will appreciate that CRISPR/Cas nucleases can also be modified in certain instances, to alter cleavage activity, PAM specificity, or other structural or functional features.

[0690] Turning first to modifications that alter cleavage activity, mutations that reduce or eliminate the activity of domains within the NUC lobe have been described above. Exemplary mutations that may be made in the RuvC domains, in the Cas9 HNH domain, or in the Cpf1 Nuc domain are described in Ran, Yamano and PCT Publication No. WO 2016/073990A1, the entire contents of each of which are incorporated herein by reference. In general, mutations that reduce or eliminate activity in one of the two nuclease domains result in CRISPR/Cas nucleases with nickase activity, but it should be noted that the type of nickase activity varies depending on which domain is inactivated. As one example, inactivation of a RuvC domain or of a Cas9 HNH domain results in a nickase. Exemplary nickase variants include Cas9 D10A and Cas9 H840A (numbering scheme according to SpCas9 wild-type sequence). Additional suitable nickase variants, including Cas12a variants, will be apparent to the skilled artisan based on the present disclosure and the knowledge in the art. The present disclosure is not limited in this respect. In some embodiments a nickase may be fused to a reverse transcriptase to produce a prime editor (PE), e.g., as described in Anzalone et al., Nature 2019; 576:149-157, the entire contents of which are incorporated herein by reference.

[0691] Modifications of PAM specificity relative to naturally occurring Cas9 reference molecules has been described for both S. pyogenes (Kleinstiver et al., Nature 2015; 523(7561):481-5); and S. aureus (Kleinstiver et al., Nat Biotechnol. 2015; 33(12):1293-1298). Modifications that improve the targeting fidelity of Cas9 have also been described (Kleinstiver et al., Nature 2016; 529:490-495). Each of these references is incorporated by reference herein.

[0692] CRISPR/Cas nucleases have also been split into two or more parts, as described by Zetsche et al., Nat Biotechnol. 2015; 33(2):139-42, incorporated by reference, and by Fine et al., Sci Rep. 2015; 5:10777, incorporated by reference.

[0693] CRISPR/Cas nucleases can be, in certain embodiments, size-optimized or truncated, for instance via one or more deletions that reduce the size of the nuclease while still retaining gRNA association, target and PAM recognition, and cleavage activities. In certain embodiments, RNA guided nucleases are bound, covalently or non-covalently, to another polypeptide, nucleotide, or other structure, optionally by means of a linker. Exemplary bound nucleases and linkers are described by Guilinger et al., Nature Biotech. 2014; 32:577-582, which is incorporated by reference herein.

[0694] CRISPR/Cas nucleases also optionally include a tag, such as, but not limited to, a nuclear localization signal, to facilitate movement of CRISPR/Cas nuclease protein into the nucleus. In certain embodiments, the CRISPR/Cas nuclease can incorporate C- and/or N-terminal nuclear localization signals. Nuclear localization sequences are known in the art.

[0695] The foregoing list of modifications is intended to be exemplary in nature, and the skilled artisan will appreciate, in view of the instant disclosure, that other modifications may be possible or desirable in certain applications. For brevity, therefore, exemplary systems, methods and compositions of the present disclosure are presented with reference to particular CRISPR/Cas nucleases, but it should be understood that the CRISPR/Cas nucleases used may be modified in ways that do not alter their operating principles. Such modifications are within the scope of the present disclosure.

[0696] Exemplary suitable nuclease variants include, but are not limited to, AsCpf1 (AsCas12a) variants comprising an M537R substitution, an H800A substitution, and/or an F870L substitution, or any combination thereof (numbering scheme according to AsCpf1 wild-type sequence). In some embodiments, a nuclease variant is a Cas12a variant, e.g., a Cas12a variant comprising 1, 2, or 3 of the amino acid substitutions selected from M537R, F870L, and H800A. In some embodiments, a Cas12a variant comprises an amino acid sequence having at least about 90%, 95%, or 100% identity to an AsCpf1 sequence described herein.

[0697] Other suitable modifications of the AsCpf1 amino acid sequence are known to those of ordinary skill in the art. Some exemplary sequences of wild-type AsCpf1 and AsCpf1 variants are provided below:

-His-AsCpf1-sNLS-sNLS H800A amino acid sequence
SEQ ID NO: 58
MGHHHHHHGSTQFEGFTNLYQVSKTLRFELIPQGKTLKHIQEQGFIEEDKARNDHYKELKPIID
RIYKTYADQCLQLVQLDWENLSAAIDSYRKEKTEETRNALIEEQATYRNAIHDYFIGRTDNLTD
AINKRHAEIYKGLFKAELFNGKVLKQLGTVTTTEHENALLRSFDKFTTYFSGFYENRKNVFSAE
DISTAIPHRIVQDNFPKFKENCHIETRLITAVPSLREHFENVKKAIGIEVSTSIEEVFSFPEYN
QLLTQTQIDLYNQLLGGISREAGTEKIKGLNEVLNLAIQKNDETAHIIASLPHRFIPLFKQILS
DRNTLSFILEEFKSDEEVIQSFCKYKTLLRNENVLETAEALFNELNSIDLTHIFISHKKLETIS
SALCDHWDTLRNALYERRISELTGKITKSAKEKVQRSLKHEDINLQEIISAAGKELSEAFKQKT
SEILSHAHAALDQPLPTTLKKQEEKEILKSQLDSLLGLYHLLDWFAVDESNEVDPEFSARLTGI
KLEMEPSLSFYNKARNYATKKPYSVEKFKLNFQMPTLASGWDVNKEKNNGAILFVKNGLYYLGI
MPKQKGRYKALSFEPTEKTSEGFDKMYYDYFPDAAKMIPKCSTQLKAVTAHFQTHTTPILLSNN
FIEPLEITKEIYDLNNPEKEPKKFQTAYAKKTGDQKGYREALCKWIDFTRDFLSKYTKTTSIDL
SSLRPSSQYKDLGEYYAELNPLLYHISFQRIAEKEIMDAVETGKLYLFQIYNKDFAKGHHGKPN
LHTLYWTGLFSPENLAKTSIKLNGQAELFYRPKSRMKRMAARLGEKMLNKKLKDQKTPIPDTLY
QELYDYVNHRLSHDLSDEARALLPNVITKEVSHEIIKDRRFTSDKFFFHVPITLNYQAANSPSK
FNQRVNAYLKEHPETPIIGIDRGERNLIYITVIDSTGKILEQRSLNTIQQFDYQKKLDNREKER
VAARQAWSVVGTIKDLKQGYLSQVIHEIVDLMIHYQAVVVLENLNFGFKSKRTGIAEKAVYQQF
EKMLIDKLNCLVLKDYPAEKVGGVLNPYQLTDQFTSFAKMGTQSGFLFYVPAPYTSKIDPLTGF
VDPFVWKTIKNHESRKHFLEGFDFLHYDVKTGDFILHFKMNRNLSFQRGLPGFMPAWDIVFEKN
ETQFDAKGTPFIAGKRIVPVIENHRFTGRYRDLYPANELIALLEEKGIVFRDGSNILPKLLEND
DSHAIDTMVALIRSVLQMRNSNAATGEDYINSPVRDLNGVCFDSRFQNPEWPMDADANGAYHIA
LKGQLLLNHLKESKDLKLQNGISNQDWLAYIQELRNGSPKKKRKVGSPKKKRKV
-Cpf1 variant 1 amino acid sequence
SEQ ID NO: 59
MTQFEGFTNLYQVSKTLRFELIPQGKTLKHIQEQGFIEEDKARNDHYKELKPIIDRIYKTYADQ
CLQLVQLDWENLSAAIDSYRKEKTEETRNALIEEQATYRNAIHDYFIGRTDNLTDAINKRHAEI
YKGLFKAELFNGKVLKQLGTVTTTEHENALLRSFDKFTTYFSGFYENRKNVFSAEDISTAIPHR
IVQDNFPKFKENCHIFTRLITAVPSLREHFENVKKAIGIFVSTSIEEVFSFPFYNQLLTQTQID
LYNQLLGGISREAGTEKIKGLNEVLNLAIQKNDETAHIIASLPHRFIPLFKQILSDRNTLSFIL
EEFKSDEEVIQSFCKYKTLLRNENVLETAEALFNELNSIDLTHIFISHKKLETISSALCDHWDT
LRNALYERRISELTGKITKSAKEKVQRSLKHEDINLQEIISAAGKELSEAFKQKTSEILSHAHA
ALDQPLPTTLKKQEEKEILKSQLDSLLGLYHLLDWFAVDESNEVDPEFSARLTGIKLEMEPSLS
FYNKARNYATKKPYSVEKFKLNFQRPTLASGWDVNKEKNNGAILFVKNGLYYLGIMPKQKGRYK
ALSFEPTEKTSEGFDKMYYDYFPDAAKMIPKCSTQLKAVTAHFQTHTTPILLSNNFIEPLEITK
EIYDLNNPEKEPKKFQTAYAKKTGDQKGYREALCKWIDFTRDFLSKYTKTTSIDLSSLRPSSQY
KDLGEYYAELNPLLYHISFQRIAEKEIMDAVETGKLYLFQIYNKDFAKGHHGKPNLHTLYWTGL
FSPENLAKTSIKLNGQAELFYRPKSRMKRMAHRLGEKMLNKKLKDQKTPIPDTLYQELYDYVNH
RLSHDLSDEARALLPNVITKEVSHEIIKDRRFTSDKFLFHVPITLNYQAANSPSKFNQRVNAYL
KEHPETPIIGIDRGERNLIYITVIDSTGKILEQRSLNTIQQFDYQKKLDNREKERVAARQAWSV
VGTIKDLKQGYLSQVIHEIVDLMIHYQAVVVLENLNFGFKSKRTGIAEKAVYQQFEKMLIDKLN
CLVLKDYPAEKVGGVLNPYQLTDQFTSFAKMGTQSGFLFYVPAPYTSKIDPLTGFVDPFVWKTI
KNHESRKHFLEGFDFLHYDVKTGDFILHFKMNRNLSFQRGLPGFMPAWDIVFEKNETQFDAKGT
PFIAGKRIVPVIENHRFTGRYRDLYPANELIALLEEKGIVFRDGSNILPKLLENDDSHAIDTMV
ALIRSVLQMRNSNAATGEDYINSPVRDLNGVCFDSRFQNPEWPMDADANGAYHIALKGQLLLNH
LKESKDLKLQNGISNQDWLAYIQELRNGRSSDDEATADSQHAAPPKKKRKVGGSGGSGGSGGSG
GSGGSGGSGGSLEHHHHHH
-Cpf1 variant 2 amino acid sequence
SEQ ID NO: 60
MTQFEGFTNLYQVSKTLRFELIPQGKTLKHIQEQGFIEEDKARNDHYKELKPIIDRIYKTYADQ
CLQLVQLDWENLSAAIDSYRKEKTEETRNALIEEQATYRNAIHDYFIGRTDNLTDAINKRHAEI
YKGLFKAELFNGKVLKQLGTVTTTEHENALLRSFDKETTYFSGEYENRKNVFSAEDISTAIPHR
IVQDNFPKFKENCHIFTRLITAVPSLREHFENVKKAIGIFVSTSIEEVFSFPFYNQLLTQTQID
LYNQLLGGISREAGTEKIKGLNEVLNLAIQKNDETAHIIASLPHRFIPLFKQILSDRNTLSFIL
EEFKSDEEVIQSFCKYKTLLRNENVLETAEALFNELNSIDLTHIFISHKKLETISSALCDHWDT
LRNALYERRISELTGKITKSAKEKVQRSLKHEDINLQEIISAAGKELSEAFKQKTSEILSHAHA
ALDQPLPTTLKKQEEKEILKSQLDSLLGLYHLLDWFAVDESNEVDPEFSARLTGIKLEMEPSLS
FYNKARNYATKKPYSVEKFKLNFQMPTLASGWDVNKEKNNGAILFVKNGLYYLGIMPKQKGRYK
ALSFEPTEKTSEGFDKMYYDYFPDAAKMIPKCSTQLKAVTAHFQTHTTPILLSNNFIEPLEITK
EIYDLNNPEKEPKKFQTAYAKKTGDQKGYREALCKWIDFTRDFLSKYTKTTSIDLSSLRPSSQY
KDLGEYYAELNPLLYHISFQRIAEKEIMDAVETGKLYLFQIYNKDFAKGHHGKPNLHTLYWTGL
FSPENLAKTSIKLNGQAELFYRPKSRMKRMAHRLGEKMLNKKLKDQKTPIPDTLYQELYDYVNH
RLSHDLSDEARALLPNVITKEVSHEIIKDRRFTSDKFFFHVPITLNYQAANSPSKFNQRVNAYL
KEHPETPIIGIDRGERNLIYITVIDSTGKILEQRSLNTIQQFDYQKKLDNREKERVAARQAWSV
VGTIKDLKQGYLSQVIHEIVDLMIHYQAVVVLENLNFGFKSKRTGIAEKAVYQQFEKMLIDKLN
CLVLKDYPAEKVGGVLNPYQLTDQFTSFAKMGTQSGFLFYVPAPYTSKIDPLTGFVDPFVWKTI
KNHESRKHFLEGFDFLHYDVKTGDFILHFKMNRNLSFQRGLPGFMPAWDIVFEKNETQFDAKGT
PFIAGKRIVPVIENHRFTGRYRDLYPANELIALLEEKGIVFRDGSNILPKLLENDDSHAIDTMV
ALIRSVLQMRNSNAATGEDYINSPVRDLNGVCFDSRFQNPEWPMDADANGAYHIALKGQLLLNH
LKESKDLKLQNGISNQDWLAYIQELRNGRSSDDEATADSQHAAPPKKKRKVGGSGGSGGSGGSG
GSGGSGGSGGSLEHHHHHH
-Cpf1 variant 3 amino acid sequence
SEQ ID NO: 61
MTQFEGFTNLYQVSKTLRFELIPQGKTLKHIQEQGFIEEDKARNDHYKELKPIIDRIYKTYADQ
CLQLVQLDWENLSAAIDSYRKEKTEETRNALIEEQATYRNAIHDYFIGRTDNLTDAINKRHAEI
YKGLFKAELFNGKVLKQLGTVTTTEHENALLRSFDKFTTYFSGFYENRKNVFSAEDISTAIPHR
IVQDNFPKFKENCHIFTRLITAVPSLREHFENVKKAIGIFVSTSIEEVFSFPFYNQLLTQTQID
LYNQLLGGISREAGTEKIKGLNEVLNLAIQKNDETAHIIASLPHRFIPLFKQILSDRNTLSFIL
EEFKSDEEVIQSFCKYKTLLRNENVLETAEALFNELNSIDLTHIFISHKKLETISSALCDHWDT
LRNALYERRISELTGKITKSAKEKVQRSLKHEDINLQEIISAAGKELSEAFKQKTSEILSHAHA
ALDQPLPTTLKKQEEKEILKSQLDSLLGLYHLLDWFAVDESNEVDPEFSARLTGIKLEMEPSLS
FYNKARNYATKKPYSVEKFKLNFQRPTLASGWDVNKEKNNGAILFVKNGLYYLGIMPKQKGRYK
ALSFEPTEKTSEGFDKMYYDYFPDAAKMIPKCSTQLKAVTAHFQTHTTPILLSNNFIEPLEITK
EIYDLNNPEKEPKKFQTAYAKKTGDQKGYREALCKWIDFTRDFLSKYTKTTSIDLSSLRPSSQY
KDLGEYYAELNPLLYHISFQRIAEKEIMDAVETGKLYLFQIYNKDFAKGHHGKPNLHTLYWTGL
FSPENLAKTSIKLNGQAELFYRPKSRMKRMAARLGEKMLNKKLKDQKTPIPDTLYQELYDYVNH
RLSHDLSDEARALLPNVITKEVSHEIIKDRRFTSDKFLFHVPITLNYQAANSPSKFNQRVNAYL
KEHPETPIIGIDRGERNLIYITVIDSTGKILEQRSLNTIQQFDYQKKLDNREKERVAARQAWSV
VGTIKDLKQGYLSQVIHEIVDLMIHYQAVVVLENLNFGFKSKRTGIAEKAVYQQFEKMLIDKLN
CLVLKDYPAEKVGGVLNPYQLTDQFTSFAKMGTQSGFLFYVPAPYTSKIDPLTGFVDPFVWKTI
KNHESRKHFLEGFDFLHYDVKTGDFILHFKMNRNLSFQRGLPGFMPAWDIVFEKNETQFDAKGT
PFIAGKRIVPVIENHRFTGRYRDLYPANELIALLEEKGIVFRDGSNILPKLLENDDSHAIDTMV
ALIRSVLQMRNSNAATGEDYINSPVRDLNGVCFDSRFQNPEWPMDADANGAYHIALKGQLLLNH
LKESKDLKLQNGISNQDWLAYIQELRNGRSSDDEATADSQHAAPPKKKRKVGGSGGSGGSGGSG
GSGGSGGSGGSLEHHHHHH
-Cpf1 variant 4 amino acid sequence
SEQ ID NO: 62
MTQFEGFTNLYQVSKTLRFELIPQGKTLKHIQEQGFIEEDKARNDHYKELKPIIDRIYKTYADQ
CLQLVQLDWENLSAAIDSYRKEKTEETRNALIEEQATYRNAIHDYFIGRTDNLTDAINKRHAEI
YKGLFKAELFNGKVLKQLGTVTTTEHENALLRSFDKFTTYFSGFYENRKNVFSAEDISTAIPHR
IVQDNFPKFKENCHIFTRLITAVPSLREHFENVKKAIGIFVSTSIEEVFSFPFYNQLLTQTQID
LYNQLLGGISREAGTEKIKGLNEVLNLAIQKNDETAHIIASLPHRFIPLFKQILSDRNTLSFIL
EEFKSDEEVIQSFCKYKTLLRNENVLETAEALFNELNSIDLTHIFISHKKLETISSALCDHWDT
LRNALYERRISELTGKITKSAKEKVQRSLKHEDINLQEIISAAGKELSEAFKQKTSEILSHAHA
ALDQPLPTTLKKQEEKEILKSQLDSLLGLYHLLDWFAVDESNEVDPEFSARLTGIKLEMEPSLS
FYNKARNYATKKPYSVEKFKLNFQRPTLASGWDVNKEKNNGAILFVKNGLYYLGIMPKQKGRYK
ALSFEPTEKTSEGFDKMYYDYFPDAAKMIPKCSTQLKAVTAHFQTHTTPILLSNNFIEPLEITK
EIYDLNNPEKEPKKFQTAYAKKTGDQKGYREALCKWIDFTRDFLSKYTKTTSIDLSSLRPSSQY
KDLGEYYAELNPLLYHISFQRIAEKEIMDAVETGKLYLFQIYNKDFAKGHHGKPNLHTLYWTGL
FSPENLAKTSIKLNGQAELFYRPKSRMKRMAARLGEKMLNKKLKDQKTPIPDTLYQELYDYVNH
RLSHDLSDEARALLPNVITKEVSHEIIKDRRFTSDKFLFHVPITLNYQAANSPSKFNQRVNAYL
KEHPETPIIGIDRGERNLIYITVIDSTGKILEQRSLNTIQQFDYQKKLDNREKERVAARQAWSV
VGTIKDLKQGYLSQVIHEIVDLMIHYQAVVVLENLNFGFKSKRTGIAEKAVYQQFEKMLIDKLN
CLVLKDYPAEKVGGVLNPYQLTDQFTSFAKMGTQSGFLFYVPAPYTSKIDPLTGFVDPFVWKTI
KNHESRKHFLEGFDFLHYDVKTGDFILHFKMNRNLSFQRGLPGFMPAWDIVFEKNETQFDAKGT
PFIAGKRIVPVIENHRFTGRYRDLYPANELIALLEEKGIVFRDGSNILPKLLENDDSHAIDTMV
ALIRSVLQMRNSNAATGEDYINSPVRDLNGVCFDSRFQNPEWPMDADANGAYHIALKGQLLLNH
LKESKDLKLQNGISNQDWLAYIQELRNGRSSDDEATADSQHAAPPKKKRKV
-Cpf1 variant 5 amino acid sequence
SEQ ID NO: 63
MTQFEGFTNLYQVSKTLRFELIPQGKTLKHIQEQGFIEEDKARNDHYKELKPIIDRIYKTYADQ
CLQLVQLDWENLSAAIDSYRKEKTEETRNALIEEQATYRNAIHDYFIGRTDNLTDAINKRHAEI
YKGLFKAELFNGKVLKQLGTVTTTEHENALLRSFDKFTTYFSGFYENRKNVFSAEDISTAIPHR
IVQDNFPKFKENCHIFTRLITAVPSLREHFENVKKAIGIFVSTSIEEVFSFPFYNQLLTQTQID
LYNQLLGGISREAGTEKIKGLNEVLNLAIQKNDETAHIIASLPHRFIPLFKQILSDRNTLSFIL
EEFKSDEEVIQSFCKYKTLLRNENVLETAEALFNELNSIDLTHIFISHKKLETISSALCDHWDT
LRNALYERRISELTGKITKSAKEKVQRSLKHEDINLQEIISAAGKELSEAFKQKTSEILSHAHA
ALDQPLPTTLKKQEEKEILKSQLDSLLGLYHLLDWFAVDESNEVDPEFSARLTGIKLEMEPSLS
FYNKARNYATKKPYSVEKFKLNFQRPTLASGWDVNKEKNNGAILFVKNGLYYLGIMPKQKGRYK
ALSFEPTEKTSEGFDKMYYDYFPDAAKMIPKCSTQLKAVTAHFQTHTTPILLSNNFIEPLEITK
EIYDLNNPEKEPKKFQTAYAKKTGDQKGYREALCKWIDFTRDFLSKYTKTTSIDLSSLRPSSQY
KDLGEYYAELNPLLYHISFQRIAEKEIMDAVETGKLYLFQIYNKDFAKGHHGKPNLHTLYWTGL
FSPENLAKTSIKLNGQAELFYRPKSRMKRMAHRLGEKMLNKKLKDQKTPIPDTLYQELYDYVNH
RLSHDLSDEARALLPNVITKEVSHEIIKDRRFTSDKFLFHVPITLNYQAANSPSKFNQRVNAYL
KEHPETPIIGIDRGERNLIYITVIDSTGKILEQRSLNTIQQFDYQKKLDNREKERVAARQAWSV
VGTIKDLKQGYLSQVIHEIVDLMIHYQAVVVLENLNFGFKSKRTGIAEKAVYQQFEKMLIDKLN
CLVLKDYPAEKVGGVLNPYQLTDQFTSFAKMGTQSGFLFYVPAPYTSKIDPLTGFVDPFVWKTI
KNHESRKHFLEGFDFLHYDVKTGDFILHFKMNRNLSFQRGLPGFMPAWDIVFEKNETQFDAKGT
PFIAGKRIVPVIENHRFTGRYRDLYPANELIALLEEKGIVFRDGSNILPKLLENDDSHAIDTMV
ALIRSVLQMRNSNAATGEDYINSPVRDLNGVCFDSRFQNPEWPMDADANGAYHIALKGQLLLNH
LKESKDLKLQNGISNQDWLAYIQELRNGRSSDDEATADSQHAAPPKKKRKV
-Cpf1 variant 6 amino acid sequence
SEQ ID NO: 64
MTQFEGFTNLYQVSKTLRFELIPQGKTLKHIQEQGFIEEDKARNDHYKELKPIIDRIYKTYADQ
CLQLVQLDWENLSAAIDSYRKEKTEETRNALIEEQATYRNAIHDYFIGRTDNLTDAINKRHAEI
YKGLFKAELFNGKVLKQLGTVTTTEHENALLRSFDKFTTYFSGFYENRKNVFSAEDISTAIPHR
IVQDNFPKFKENCHIFTRLITAVPSLREHFENVKKAIGIFVSTSIEEVFSFPFYNQLLTQTQID
LYNQLLGGISREAGTEKIKGLNEVLNLAIQKNDETAHIIASLPHRFIPLFKQILSDRNTLSFIL
EEFKSDEEVIQSFCKYKTLLRNENVLETAEALFNELNSIDLTHIFISHKKLETISSALCDHWDT
LRNALYERRISELTGKITKSAKEKVQRSLKHEDINLQEIISAAGKELSEAFKQKTSEILSHAHA
ALDQPLPTTLKKQEEKEILKSQLDSLLGLYHLLDWFAVDESNEVDPEFSARLTGIKLEMEPSLS
FYNKARNYATKKPYSVEKFKLNFQRPTLASGWDVNKEKNNGAILFVKNGLYYLGIMPKQKGRYK
ALSFEPTEKTSEGFDKMYYDYFPDAAKMIPKCSTQLKAVTAHFQTHTTPILLSNNFIEPLEITK
EIYDLNNPEKEPKKFQTAYAKKTGDQKGYREALCKWIDFTRDFLSKYTKTTSIDLSSLRPSSQY
KDLGEYYAELNPLLYHISFQRIAEKEIMDAVETGKLYLFQIYNKDFAKGHHGKPNLHTLYWTGL
FSPENLAKTSIKLNGQAELFYRPKSRMKRMAHRLGEKMLNKKLKDQKTPIPDTLYQELYDYVNH
RLSHDLSDEARALLPNVITKEVSHEIIKDRRFTSDKFLFHVPITLNYQAANSPSKFNQRVNAYL
KEHPETPIIGIDRGERNLIYITVIDSTGKILEQRSLNTIQQFDYQKKLDNREKERVAARQAWSV
VGTIKDLKQGYLSQVIHEIVDLMIHYQAVVVLENLNFGFKSKRTGIAEKAVYQQFEKMLIDKLN
CLVLKDYPAEKVGGVLNPYQLTDQFTSFAKMGTQSGFLFYVPAPYTSKIDPLTGFVDPFVWKTI
KNHESRKHFLEGFDFLHYDVKTGDFILHFKMNRNLSFQRGLPGFMPAWDIVFEKNETQFDAKGT
PFIAGKRIVPVIENHRFTGRYRDLYPANELIALLEEKGIVFRDGSNILPKLLENDDSHAIDTMV
ALIRSVLQMRNSNAATGEDYINSPVRDLNGVCFDSRFQNPEWPMDADANGAYHIALKGQLLLNH
LKESKDLKLQNGISNQDWLAYIQELRNGRSSDDEATADSQHAAPPKKKRKVGGSGGSGGSGGSG
GSGGSGGSGGSLEHHHHHH
-Cpf1 variant 7 amino acid sequence
SEQ ID NO: 65
MGRDPGKPIPNPLLGLDSTAPKKKRKVGIHGVPAATQFEGFTNLYQVSKTLRFELIPQGKTLKH
IQEQGFIEEDKARNDHYKELKPIIDRIYKTYADQCLQLVQLDWENLSAAIDSYRKEKTEETRNA
LIEEQATYRNAIHDYFIGRTDNLTDAINKRHAEIYKGLFKAELFNGKVLKQLGTVTTTEHENAL
LRSFDKFTTYFSGFYENRKNVFSAEDISTAIPHRIVQDNFPKFKENCHIFTRLITAVPSLREHF
ENVKKAIGIFVSTSIEEVFSFPFYNQLLTQTQIDLYNQLLGGISREAGTEKIKGLNEVLNLAIQ
KNDETAHIIASLPHRFIPLFKQILSDRNTLSFILEEFKSDEEVIQSFCKYKTLLRNENVLETAE
ALFNELNSIDLTHIFISHKKLETISSALCDHWDTLRNALYERRISELTGKITKSAKEKVQRSLK
HEDINLQEIISAAGKELSEAFKQKTSEILSHAHAALDQPLPTTLKKQEEKEILKSQLDSLLGLY
HLLDWFAVDESNEVDPEFSARLTGIKLEMEPSLSFYNKARNYATKKPYSVEKFKLNFQMPTLAS
GWDVNKEKNNGAILFVKNGLYYLGIMPKQKGRYKALSFEPTEKTSEGFDKMYYDYFPDAAKMIP
KCSTQLKAVTAHFQTHTTPILLSNNFIEPLEITKEIYDLNNPEKEPKKFQTAYAKKTGDQKGYR
EALCKWIDFTRDFLSKYTKTTSIDLSSLRPSSQYKDLGEYYAELNPLLYHISFQRIAEKEIMDA
VETGKLYLFQIYNKDFAKGHHGKPNLHTLYWTGLFSPENLAKTSIKLNGQAELFYRPKSRMKRM
AHRLGEKMLNKKLKDQKTPIPDTLYQELYDYVNHRLSHDLSDEARALLPNVITKEVSHEIIKDR
RFTSDKFFFHVPITLNYQAANSPSKFNQRVNAYLKEHPETPIIGIDRGERNLIYITVIDSTGKI
LEQRSLNTIQQFDYQKKLDNREKERVAARQAWSVVGTIKDLKQGYLSQVIHEIVDLMIHYQAVV
VLENLNFGFKSKRTGIAEKAVYQQFEKMLIDKLNCLVLKDYPAEKVGGVLNPYQLTDQFTSFAK
MGTQSGFLFYVPAPYTSKIDPLTGFVDPFVWKTIKNHESRKHFLEGFDFLHYDVKTGDFILHFK
MNRNLSFQRGLPGFMPAWDIVFEKNETQFDAKGTPFIAGKRIVPVIENHRFTGRYRDLYPANEL
IALLEEKGIVFRDGSNILPKLLENDDSHAIDTMVALIRSVLQMRNSNAATGEDYINSPVRDLNG
VCFDSRFQNPEWPMDADANGAYHIALKGQLLLNHLKESKDLKLQNGISNQDWLAYIQELRNPKK
KRKVKLAAALEHHHHHH
-Exemplary AsCpf1 wild-type amino acid sequence
SEQ ID NO: 66
MTQFEGFTNLYQVSKTLRFELIPQGKTLKHIQEQGFIEEDKARNDHYKELKPIIDRIYKTYADQ
CLQLVQLDWENLSAAIDSYRKEKTEETRNALIEEQATYRNAIHDYFIGRTDNLTDAINKRHAEI
YKGLFKAELFNGKVLKQLGTVTTTEHENALLRSFDKFTTYFSGFYENRKNVFSAEDISTAIPHR
IVQDNFPKFKENCHIFTRLITAVPSLREHFENVKKAIGIFVSTSIEEVFSFPFYNQLLTQTQID
LYNQLLGGISREAGTEKIKGLNEVLNLAIQKNDETAHIIASLPHRFIPLFKQILSDRNTLSFIL
EEFKSDEEVIQSFCKYKTLLRNENVLETAEALFNELNSIDLTHIFISHKKLETISSALCDHWDT
LRNALYERRISELTGKITKSAKEKVQRSLKHEDINLQEIISAAGKELSEAFKQKTSEILSHAHA
ALDQPLPTTLKKQEEKEILKSQLDSLLGLYHLLDWFAVDESNEVDPEFSARLTGIKLEMEPSLS
FYNKARNYATKKPYSVEKFKLNFQMPTLASGWDVNKEKNNGAILFVKNGLYYLGIMPKQKGRYK
ALSFEPTEKTSEGFDKMYYDYFPDAAKMIPKCSTQLKAVTAHFQTHTTPILLSNNFIEPLEITK
EIYDLNNPEKEPKKFQTAYAKKTGDQKGYREALCKWIDFTRDFLSKYTKTTSIDLSSLRPSSQY
KDLGEYYAELNPLLYHISFQRIAEKEIMDAVETGKLYLFQIYNKDFAKGHHGKPNLHTLYWTGL
FSPENLAKTSIKLNGQAELFYRPKSRMKRMAHRLGEKMLNKKLKDQKTPIPDTLYQELYDYVNH
RLSHDLSDEARALLPNVITKEVSHEIIKDRRFTSDKFFFHVPITLNYQAANSPSKFNQRVNAYL
KEHPETPIIGIDRGERNLIYITVIDSTGKILEQRSLNTIQQFDYQKKLDNREKERVAARQAWSV
VGTIKDLKQGYLSQVIHEIVDLMIHYQAVVVLENLNFGFKSKRTGIAEKAVYQQFEKMLIDKLN
CLVLKDYPAEKVGGVLNPYQLTDQFTSFAKMGTQSGFLFYVPAPYTSKIDPLTGFVDPFVWKTI
KNHESRKHFLEGFDFLHYDVKTGDFILHFKMNRNLSFQRGLPGFMPAWDIVFEKNETQFDAKGT
PFIAGKRIVPVIENHRFTGRYRDLYPANELIALLEEKGIVFRDGSNILPKLLENDDSHAIDTMV
ALIRSVLQMRNSNAATGEDYINSPVRDLNGVCFDSRFQNPEWPMDADANGAYHIALKGQLLLNH
LKESKDLKLQNGISNQDWLAYIQELRN

[0698] Additional suitable nucleases and nuclease variants will be apparent to the skilled artisan based on the present disclosure in view of the knowledge in the art. Exemplary suitable nucleases may include, but are not limited to those provided in Table 5.

TABLE 5
Exemplary Suitable CRISPR/Cas Nucleases

| | Length | | |
|---|---|---|---|
| Nuclease | (A.A.) | PAM | Reference |
| SpCas9 | 1368 | NGG | Cong et al., Science 2013; 339(6121): 819-23 |
| SaCas9 | 1053 | NNGRRT | Ran et al., Nature 2015; 520(7546): 186-91. |
| (KKH) | 1067 | NNNRRT | Kleinstiver et al., Nat Biotechnol. 2015; |
| SaCas9 | | | 33(12): 1293-1298 |
| AsCpf1 | 1353 | TTTV | Zetsche et al., Nat Biotechnol. 2017; 35(1): 31- |
| (AsCas12a) | | | 34. |
| LbCpf1 | 1274 | TTTV | Zetsche et al., Cell 2015; 163(3): 759-71. |
| (LbCas12a) | | | |
| CasX | 980 | TTC | Burstein et al., Nature 2017; 542(7640): 237- |
| | | | 241. |
| CasY | 1200 | TA | Burstein et al., Nature 2017; 542(7640): 237- |
| | | | 241. |
| Cas12h1 | 870 | RTR | Yan et al., Science 2019; 363(6422): 88-91. |
| Cas12i1 | 1093 | TTN | Yan et al., Science 2019; 363(6422): 88-91. |
| Cas12c1 | unknown | TG | Yan et al., Science 2019; 363(6422): 88-91. |
| Cas12c2 | unknown | TN | Yan et al., Science 2019; 363(6422): 88-91. |
| eSpCas9 | 1423 | NGG | Chen et al., Nature 2017; 550(7676): 407-410. |
| Cas9-HF1 | 1367 | NGG | Chen et al., Nature 2017; 550(7676): 407-410. |
| HypaCas9 | 1404 | NGG | Chen et al., Nature 2017; 550(7676): 407-410. |
| dCas9-Fokl | 1623 | NGG | U.S. Patent No. 9,322,037 |
| Sniper-Cas9 | 1389 | NGG | Lee et al., Nat Commun. 2018; 9(1): 3048. |
| xCas9 | 1786 | NGG, NG, | Hu et al., Nature. 2018 Apr 5;556(7699): 57-63. |
| | | GAA, GAT | |
| AaCas12b | 1129 | TTN | Teng et al., Cell Discov. 2018; 4: 63. |
| evoCas9 | 1423 | NGG | Casini et al., Nat Biotechnol. 2018; 36(3): 265- |
| | | | 271. |
| SpCas9-NG | 1423 | NG | Nishimasu et al., Science 2018; |
| | | | 361(6408): 1259-1262. |
| VRQR | 1368 | NGA | Li et al., The CRISPR Journal, 2018; 01: 01 |
| VRER | 1372 | NGCG | Kleinstiver et al., Nature 2016; 529(7587): 490- |
| | | | 5. |
| NmeCas9 | 1082 | NNNNGATT | Amrani et al., Genome Biol. 2018; 19(1): 214. |
| CjCas9 | 984 | NNNNRYAC | Kim et al., Nat Commun. 2017; 8: 14500. |
| BhCas12b | 1108 | ATTN | Strecker et al., Nat Commun. 2019; 10(1): 212. |
| BhCas12b V4 | 1108 | ATTN | Pausch et al., Science 2020; 369(6501): 333- |
| | | | 337. |

Guide RNA (gRNA) Molecules

[0699] Guide RNAs (gRNAs) of the present disclosure may be unimolecular (comprising a single RNA molecule, and referred to alternatively as chimeric), or modular (comprising more than one, and typically two, separate RNA molecules, such as a crRNA and a tracrRNA, which are usually associated with one another, for instance by duplexing). gRNAs and their component parts are described throughout the literature, for instance in Briner et al., Molecular Cell 2014; 56(2):333-339 (“Briner”), and in PCT Publication No. WO2016/073990A1.

[0700] In bacteria and archaea, type II CRISPR systems generally comprise an CRISPR/Cas nuclease protein such as Cas9, a CRISPR RNA (crRNA) that includes a 5′ region that is complementary to a foreign sequence, and a trans-activating crRNA (tracrRNA) that includes a 5′ region that is complementary to, and forms a duplex with, a 3′ region of the crRNA. While not intending to be bound by any theory, it is thought that this duplex facilitates the formation of—and is necessary for the activity of—the Cas9/gRNA complex. As type II CRISPR systems were adapted for use in gene editing, it was discovered that the crRNA and tracrRNA could be joined into a single unimolecular or chimeric guide RNA, in one non-limiting example, by means of a four nucleotide (e.g., GAAA) “tetraloop” or “linker” sequence bridging complementary regions of the crRNA (at its 3′ end) and the tracrRNA (at its 5′ end). See Mali et al., Science 2013; 339(6121):823-826 (“Mali”); Jiang et al., Nat Biotechnol. 2013; 31(3):233-239 (“Jiang”); and Jinek et al., Science 2012; 337(6096):816-821 (“Jinek 2012”).

[0701] Guide RNAs, whether unimolecular or modular, include a “targeting domain” that is fully or partially complementary to a target domain within a target sequence, such as a DNA sequence in the genome of a cell where editing is desired. Targeting domains are referred to by various names in the literature, including without limitation “guide sequences” (Hsu et al., Nat Biotechnol. 2013; 31(9):827-832, (“Hsu”)), “complementarity regions” (PCT Publication No. WO2016/073990A1), “spacers” (Briner) and generically as “crRNAs” (Jiang). Irrespective of the names they are given, targeting domains are typically 10-30 nucleotides in length, and in certain embodiments are 16-24 nucleotides in length (for instance, 16, 17, 18, 19, 20, 21, 22, 23 or 24 nucleotides in length), and are at or near the 5′ terminus of in the case of a Cas9 gRNA, and at or near the 3′ terminus in the case of a Cpf1 gRNA.

[0702] In addition to the targeting domains, gRNAs typically (but not necessarily, as discussed below) include a plurality of domains that may influence the formation or activity of gRNA/Cas9 complexes. For instance, as mentioned above, the duplexed structure formed by first and secondary complementarity domains of a gRNA (also referred to as a repeat:anti-repeat duplex) interacts with the recognition (REC) lobe of Cas9 and can mediate the formation of Cas9/gRNA complexes. See Nishimasu 2014 and 2015. It should be noted that the first and/or second complementarity domains may contain one or more poly-A tracts, which can be recognized by RNA polymerases as a termination signal. The sequence of the first and second complementarity domains are, therefore, optionally modified to eliminate these tracts and promote the complete in vitro transcription of gRNAs, for instance through the use of A-G swaps as described in Briner, or A-U swaps. These and other similar modifications to the first and second complementarity domains are within the scope of the present disclosure.

[0703] Along with the first and second complementarity domains, Cas9 gRNAs typically include two or more additional duplexed regions that are involved in nuclease activity in vivo but not necessarily in vitro. See Nishimasu 2015. A first stem-loop one near the 3′ portion of the second complementarity domain is referred to variously as the “proximal domain,” (PCT Publication No. WO2016/073990A1) “stem loop 1” (Nishimasu 2014 and 2015) and the “nexus” (Briner). One or more additional stem loop structures are generally present near the 3′ end of the gRNA, with the number varying by species: S. pyogenes gRNAs typically include two 3′ stem loops (for a total of four stem loop structures including the repeat:anti-repeat duplex), while S. aureus and other species have only one (for a total of three stem loop structures). A description of conserved stem loop structures (and gRNA structures more generally) organized by species is provided in Briner.

[0704] While the foregoing description has focused on gRNAs for use with Cas9, it should be appreciated that other CRISPR/Cas nucleases have been (or may in the future be) discovered or invented which utilize gRNAs that differ in some ways from those described to this point. For instance, Cpf1 (“CRISPR from Prevotella and Franciscella 1”) which is also called Cas12a is a CRISPR/Cas nuclease that does not require a tracrRNA to function (see Zetsche et al., Cell 2015; 163:759-771 (“Zetsche I”)). A gRNA for use in a Cpf1 genome editing system generally includes a targeting domain and a complementarity domain (alternately referred to as a “handle”). It should also be noted that, in gRNAs for use with Cpf1, the targeting domain is usually present at or near the 3′ end, rather than the 5′ end as described above in connection with Cas9 gRNAs (the handle is at or near the 5′ end of a Cpf1 gRNA).

[0705] Those of skill in the art will appreciate, however, that although structural differences may exist between gRNAs from different prokaryotic species, or between Cpf1 and Cas9 gRNAs, the principles by which gRNAs operate are generally consistent. Because of this consistency of operation, gRNAs can be defined, in broad terms, by their targeting domain sequences, and skilled artisans will appreciate that a given targeting domain sequence can be incorporated in any suitable gRNA, including a unimolecular or chimeric gRNA, or a gRNA that includes one or more chemical modifications and/or sequential modifications (substitutions, additional nucleotides, truncations, etc.). Thus, for economy of presentation in this disclosure, gRNAs may be described solely in terms of their targeting domain sequences.

[0706] More generally, skilled artisans will appreciate that some aspects of the present disclosure relate to systems, methods and compositions that can be implemented using multiple CRISPR/Cas nucleases. For this reason, unless otherwise specified, the term gRNA should be understood to encompass any suitable gRNA that can be used with any CRISPR/Cas nuclease, and not only those gRNAs that are compatible with a particular species of Cas9 or Cpf1. By way of illustration, the term gRNA can, in certain embodiments, include a gRNA for use with any CRISPR/Cas nuclease occurring in a Class 2 CRISPR system, such as a type II or type V or CRISPR system, or an CRISPR/Cas nuclease derived or adapted therefrom.

[0707] In some embodiments a method or system of the present disclosure may use more than one gRNA. In some embodiments, two or more gRNAs may be used to create two or more double strand breaks in the genome of a cell. In some embodiments, a multiplexed editing strategy may be used that targets two or more essential genes at the same time with two or more knock-in cassettes. In some such embodiments, the two or more knock-in cassettes may comprise different exogenous cargo sequences, e.g., different knock-in cassettes may encode different gene products of interest and thus the edited cells will express a plurality of gene products of interest from different knock-in cassettes targeted to different loci.

[0708] In some embodiments using more than one gRNA, a double-strand break may be caused by a dual-gRNA paired “nickase” strategy. In some embodiments for selecting gRNAs, including the determination for which gRNAs can be used for the dual-gRNA paired “nickase” strategy, gRNA pairs should be oriented on the DNA such that PAMs are facing out and cutting with the D10A Cas9 nickase will result in 5′ overhangs.

[0709] In some embodiments, a method or system of the present disclosure may use a prime editing gRNA (pegRNA) in conjunction with a prime editor (PE). As is well known in the art, a pegRNA is substantially larger than standard gRNAs, e.g., in some embodiments longer than 50, 100, 150 or 250 nucleotides, e.g., as described in Anzalone et al., Nature 2019; 576:17-19-157, the entire contents of which are incorporated herein by reference. The pegRNA is a gRNA with a primer binding sequence (PBS) and a donor template containing the desired RNA sequence added at one of the termini, e.g., the 3′ end. The PE:pegRNA complex binds to the target DNA, and the nickase domain of the prime editor nicks only one strand, generating a flap. The PBS, located on the pegRNA, binds to the DNA flap and the edited RNA sequence is reverse transcribed using the reverse transcriptase domain of the prime editor. The edited strand is incorporated into the DNA at the end of the nicked flap, and the target DNA is repaired with the new reverse transcribed DNA. The original DNA segment is removed by a cellular endonuclease. This leaves one strand edited, and one strand unedited. In the newest PE systems, e.g., PE3 and PE3b, the unedited strand can be corrected to match the newly edited strand by using an additional standard gRNA. In this case, the unedited strand is nicked by a nickase and the newly edited strand is used as a template to repair the nick, thus completing the edit.

[0710] gRNA Design

[0711] Methods for selection and validation of target sequences as well as off-target analyses have been described previously, e.g., in Mali; Hsu; Fu et al., Nat Biotechnol 2014; 32(3):279-84, Heigwer et al., Nat methods 2014; 11(2):122-3; Bae et al., Bioinformatics 2014; 30(10):1473-5; and Xiao et al. Bioinformatics 2014; 30(8):1180-1182. As a non-limiting example, gRNA design may involve the use of a software tool to optimize the choice of potential target sequences corresponding to a user's target sequence, e.g., to minimize total off-target activity across the genome. While off-target activity is not limited to cleavage, the cleavage efficiency at each off-target sequence can be predicted, e.g., using an experimentally-derived weighting scheme. These and other guide selection methods are described in detail in PCT Publication No. WO2016/073990A1.

[0712] For example, methods for selection and validation of target sequences as well as off-target analyses can be performed using cas-offinder (Bae et al., Bioinformatics 2014; 30:1473-5). Cas-offender is a tool that can quickly identify all sequences in a genome that have up to a specified number of mismatches to a guide sequence.

[0713] As another example, methods for scoring how likely a given sequence is to be an off-target (e.g., once candidate target sequences are identified) can be performed. An exemplary score includes a Cutting Frequency Determination (CFD) score, as described by Doench et al., Nat Biotechnol. 2016; 34:184-91.

[0714] gRNA Modifications

[0715] In certain embodiments, gRNAs as used herein may be modified or unmodified gRNAs. In certain embodiments, a gRNA may include one or more modifications. In certain embodiments, the one or more modifications may include a phosphorothioate linkage modification, a phosphorodithioate (PS2) linkage modification, a 2′-O-methyl modification, or combinations thereof. In certain embodiments, the one or more modifications may be at the 5′ end of the gRNA, at the 3′ end of the gRNA, or combinations thereof.

[0716] In certain embodiments, a gRNA modification may comprise one or more phosphorodithioate (PS2) linkage modifications.

[0717] In some embodiments, a gRNA used herein includes one or more or a stretch of deoxyribonucleic acid (DNA) bases, also referred to herein as a “DNA extension.” In some embodiments, a gRNA used herein includes a DNA extension at the 5′ end of the gRNA, the 3′ end of the gRNA, or a combination thereof. In certain embodiments, the DNA extension may be 1, 2, 3, 4, 5, 6, 7, 8, 9, 10, 11, 12, 13, 14, 15, 16, 17, 18, 19, 20, 21, 22, 23, 24, 25, 26, 27, 28, 29, 30, 31, 32, 33, 34, 35, 36, 37, 38, 39, 40, 41, 42, 43, 44, 45, 46, 47, 48, 49, 50, 51, 52, 53, 54, 55, 56, 57, 58, 59, 60, 61, 62, 63, 64, 65, 66, 67, 68, 69, 70, 71, 72, 73, 74, 75, 76, 77, 78, 79, 80, 81, 82, 83, 84, 85, 86, 87, 88, 89, 90, 91, 92, 93, 94, 95, 96, 97, 98, 99, or 100 DNA bases long. For example, in certain embodiments, the DNA extension may be 1, 2, 3, 4, 5, 10, 15, 20, or 25 DNA bases long. In certain embodiments, the DNA extension may include one or more DNA bases selected from adenine (A), guanine (G), cytosine (C), or thymine (T). In certain embodiments, the DNA extension includes the same DNA bases. For example, the DNA extension may include a stretch of adenine (A) bases. In certain embodiments, the DNA extension may include a stretch of thymine (T) bases. In certain embodiments, the DNA extension includes a combination of different DNA bases.

[0718] Exemplary suitable 5′ extensions for Cpf1 guide RNAs are provided in Table 6 below:

TABLE 6
Exemplary Cpf1 gRNA 5′ Extensions

| SEQ | | 5′ |
|---|---|---|
| ID NO: | 5′ extension sequence | modification |
| N/A | rCrUrUrUrU | +5 RNA |
| 67 | rArArGrArCrCrUrUrUrU | +10 RNA |
| 68 | TArUrGrUrGrUrUrUrUrUrGrUrCrArArArArGrArCr | +25 RNA |
| | CrUrUrUrU | |
| 69 | TArGrGrCrCrArGrCrUrUrGrCrCrGrGrUrUrUrUrUr | +60 RNA |
| | UrArGrUrCrGrUrGrCrUrGrCrUrUrCrArUrGrUrGr | |
| | UrUrUrUrUrGrUrCrArArArArGrArCrCrUrUrUrU | |
| N/A | CTTTT | +5 DNA |
| 70 | AAGACCTTTT | +10 DNA |
| 71 | ATGTGTTTTTGTCAAAAGACCTTTT | +25 DNA |
| 72 | AGGCCAGCTTGCCGGTTTTTTAGTCGTGCTGC | +60 DNA |
| | TTCATGTGTTTTTGTCAAAAGACCTTTT | |
| 73 | TTTTTGTCAAAAGACCTTTT | +20 DNA |
| 74 | GCTTCATGTGTTTTTGTCAAAAGACCTTTT | +30 DNA |
| 75 | GCCGGTTTTTTAGTCGTGCTGCTTCATGTGTT | +50 DNA |
| | TTTGTCAAAAGACCTTTT | |
| 76 | TAGTCGTGCTGCTTCATGTGTTTTTGTCAAAA | +40 DNA |
| | GACCTTTT | |
| 77 | C*C*GAAGTTTTCTTCGGTTTT | +20 DNA + |
| | | 2xPS |
| 78 | T*T*TTTCCGAAGTTTTCTTCGGTTTT | +25 DNA + |
| | | 2xPS |
| 79 | A*A*CGCTTTTTCCGAAGTTTTCTTCGGTTTT | +30 DNA + |
| | | 2xPS |
| 80 | G*C*GTTGTTTTCAACGCTTTTTCCGAAGTTTT | +41 DNA + |
| | CTTCGGTTTT | 2xPS |
| 81 | G*G*CTTCTTTTGAAGCCTTTTTGCGTTGTTTT | +62 DNA + |
| | CAACGCTTTTTCCGAAGTTTTCTTCGGTTTT | 2xPS |
| 82 | A*T*GTGTTTTTGTCAAAAGACCTTTT | +25 DNA + |
| | | 2xPS |
| 83 | AAAAAAAAAAAAAAAAAAAAAAAAA | +25 A |
| 84 | TTTTTTTTTTTTTTTTTTTTTTTTT | +25 T |
| 85 | mA*mU*rGrUrGrUrUrUrUrUrGrUrCrArArArArGr | +25 RNA + |
| | ArCrCrUrUrUrU | 2xPS |
| 86 | mA*mA*rArArArArArArArArArArArArArArArAr | PolyA RNA + |
| | ArArArArArArA | 2xPS |
| 87 | mU*mU*rUrUrUrUrUrUrUrUrUrUrUrUrUrUrUrUr | PolyU RNA + |
| | UrUrUrUrUrUrU | 2xPS |

[0719] In certain embodiments, a gRNA used herein includes a DNA extension as well as a chemical modification, e.g., one or more phosphorothioate linkage modifications, one or more phosphorodithioate (PS2) linkage modifications, one or more 2′-O-methyl modifications, or one or more additional suitable chemical gRNA modification disclosed herein, or combinations thereof. In certain embodiments, the one or more modifications may be at the 5′ end of the gRNA, at the 3′ end of the gRNA, or combinations thereof.

[0720] Without wishing to be bound by theory, it is contemplated that any DNA extension may be used with any gRNA disclosed herein, so long as it does not hybridize to the target nucleic acid being targeted by the gRNA and it also exhibits an increase in editing at the target nucleic acid site relative to a gRNA which does not include such a DNA extension.

[0721] In some embodiments, a gRNA used herein includes one or more or a stretch of ribonucleic acid (RNA) bases, also referred to herein as an “RNA extension.” In some embodiments, a gRNA used herein includes an RNA extension at the 5′ end of the gRNA, the 3′ end of the gRNA, or a combination thereof. In certain embodiments, the RNA extension may be 1, 2, 3, 4, 5, 6, 7, 8, 9, 10, 11, 12, 13, 14, 15, 16, 17, 18, 19, 20, 21, 22, 23, 24, 25, 26, 27, 28, 29, 30, 31, 32, 33, 34, 35, 36, 37, 38, 39, 40, 41, 42, 43, 44, 45, 46, 47, 48, 49, 50, 51, 52, 53, 54, 55, 56, 57, 58, 59, 60, 61, 62, 63, 64, 65, 66, 67, 68, 69, 70, 71, 72, 73, 74, 75, 76, 77, 78, 79, 80, 81, 82, 83, 84, 85, 86, 87, 88, 89, 90, 91, 92, 93, 94, 95, 96, 97, 98, 99, or 100 RNA bases long. For example, in certain embodiments, the RNA extension may be 1, 2, 3, 4, 5, 10, 15, 20, or 25 RNA bases long. In certain embodiments, the RNA extension may include one or more RNA bases selected from adenine (rA), guanine (rG), cytosine (rC), or uracil (rU), in which the “r” represents RNA, 2′-hydroxy. In certain embodiments, the RNA extension includes the same RNA bases. For example, the RNA extension may include a stretch of adenine (rA) bases. In certain embodiments, the RNA extension includes a combination of different RNA bases. In certain embodiments, a gRNA used herein includes an RNA extension as well as one or more phosphorothioate linkage modifications, one or more phosphorodithioate (PS2) linkage modifications, one or more 2′-O-methyl modifications, one or more additional suitable gRNA modification, e.g., chemical modification, disclosed herein, or combinations thereof. In certain embodiments, the one or more modifications may be at the 5′ end of the gRNA, at the 3′ end of the gRNA, or combinations thereof. In certain embodiments, a gRNA including a RNA extension may comprise a sequence set forth herein.

[0722] It is contemplated that gRNAs used herein may also include an RNA extension and a DNA extension. In certain embodiments, the RNA extension and DNA extension may both be at the 5′ end of the gRNA, the 3′ end of the gRNA, or a combination thereof. In certain embodiments, the RNA extension is at the 5′ end of the gRNA and the DNA extension is at the 3′ end of the gRNA. In certain embodiments, the RNA extension is at the 3′ end of the gRNA and the DNA extension is at the 5′ end of the gRNA.

[0723] In some embodiments, a gRNA which includes a modification, e.g., a DNA extension at the 5′ end and/or a chemical modification as disclosed herein, is complexed with a CRISPR/Cas nuclease, e.g., an AsCpf1 nuclease, to form an RNP, which is then employed to edit a target cell, e.g., a pluripotent stem cell or a progeny thereof.

[0724] Certain exemplary modifications discussed in this section can be included at any position within a gRNA sequence including, without limitation at or near the 5′ end (e.g., within 1-10, 1-5, or 1-2 nucleotides of the 5′ end) and/or at or near the 3′ end (e.g., within 1-10, 1-5, or 1-2 nucleotides of the 3′ end). In some cases, modifications are positioned within functional motifs, such as the repeat-anti-repeat duplex of a Cas9 gRNA, a stem loop structure of a Cas9 or Cpf1 gRNA, and/or a targeting domain of a gRNA.

[0725] As one example, the 5′ end of a gRNA can include a eukaryotic mRNA cap structure or cap analog (e.g., a G(5′)ppp(5′)G cap analog, a m7G(5′)ppp(5′)G cap analog, or a 3′-O-Me-m7G(5′)ppp(5′)G anti reverse cap analog (ARCA)), as shown below:

[chemical structure]

The cap or cap analog can be included during either chemical or enzymatic synthesis of the gRNA.

[0726] Along similar lines, the 5′ end of the gRNA can lack a 5′ triphosphate group. For instance, in vitro transcribed gRNAs can be phosphatase-treated (e.g., using calf intestinal alkaline phosphatase) to remove a 5′ triphosphate group.

[0727] Another common modification involves the addition, at the 3′ end of a gRNA, of a plurality (e.g., 1-10, 10-20, or 25-200) of adenine (A) residues referred to as a polyA tract. The polyA tract can be added to a gRNA during chemical or enzymatic synthesis, using a polyadenosine polymerase (e.g., E. coli Poly(A)Polymerase).

[0728] Guide RNAs can be modified at a 3′ terminal U ribose. For example, the two terminal hydroxyl groups of the U ribose can be oxidized to aldehyde groups and a concomitant opening of the ribose ring to afford a modified nucleoside as shown below:

[chemical structure]

wherein “U” can be an unmodified or modified uridine.

[0729] The 3′ terminal U ribose can be modified with a 2′3′ cyclic phosphate as shown below:

[chemical structure]

wherein “U” can be an unmodified or modified uridine.

[0730] Guide RNAs can contain 3′ nucleotides that can be stabilized against degradation, e.g., by incorporating one or more of the modified nucleotides described herein. In certain embodiments, uridines can be replaced with modified uridines, e.g., 5-(2-amino)propyl uridine, and 5-bromo uridine, or with any of the modified uridines described herein; adenosines and guanosines can be replaced with modified adenosines and guanosines, e.g., with modifications at the 8-position, e.g., 8-bromo guanosine, or with any of the modified adenosines or guanosines described herein.

[0731] In certain embodiments, sugar-modified ribonucleotides can be incorporated into a gRNA, e.g., wherein the 2′ OH-group is replaced by a group selected from H, —OR, —R (wherein R can be, e.g., alkyl, cycloalkyl, aryl, aralkyl, heteroaryl or sugar), halo, —SH, —SR (wherein R can be, e.g., alkyl, cycloalkyl, aryl, aralkyl, heteroaryl or sugar), amino (wherein amino can be, e.g., NH₂, alkylamino, dialkylamino, heterocyclyl, arylamino, diarylamino, heteroarylamino, diheteroarylamino, or amino acid); or cyano (—CN). In certain embodiments, the phosphate backbone can be modified as described herein, e.g., with a phosphothioate (PhTx) group. In certain embodiments, one or more of the nucleotides of the gRNA can each independently be a modified or unmodified nucleotide including, but not limited to 2′-sugar modified, such as, 2′-O-methyl, 2′-O-methoxyethyl, or 2′-Fluoro modified including, e.g., 2′-F or 2′-O-methyl, adenosine (A), 2′-F or 2′-O-methyl, cytidine (C), 2′-F or 2′-O-methyl, uridine (U), 2′-F or 2′-O-methyl, thymidine (T), 2′-F or 2′-O-methyl, guanosine (G), 2′-O-methoxyethyl-5-methyluridine (Teo), 2′-O-methoxyethyladenosine (Aeo), 2′-O-methoxyethyl-5-methylcytidine (m5Ceo), and any combinations thereof.

[0732] Guide RNAs can also include “locked” nucleic acids (LNA) in which the 2′ OH-group can be connected, e.g., by a C1-6 alkylene or C1-6 heteroalkylene bridge, to the 4′ carbon of the same ribose sugar. Any suitable moiety can be used to provide such bridges, including without limitation methylene, propylene, ether, or amino bridges; O-amino (wherein amino can be, e.g., NH₂, alkylamino, dialkylamino, heterocyclyl, arylamino, diarylamino, heteroarylamino, or diheteroarylamino, ethylenediamine, or polyamino) and aminoalkoxy or O(CH₂)ₙ-amino (wherein amino can be, e.g., NH₂, alkylamino, dialkylamino, heterocyclyl, arylamino, diarylamino, heteroarylamino, or diheteroarylamino, ethylenediamine, or polyamino).

[0733] In certain embodiments, a gRNA can include a modified nucleotide which is multicyclic (e.g., tricyclo; and “unlocked” forms, such as glycol nucleic acid (GNA) (e.g., R-GNA or S-GNA, where ribose is replaced by glycol units attached to phosphodiester bonds), or threose nucleic acid (TNA, where ribose is replaced with α-L-threofuranosyl-(3′→2′)).

[0734] Generally, gRNAs include the sugar group ribose, which is a 5-membered ring having an oxygen. Exemplary modified gRNAs can include, without limitation, replacement of the oxygen in ribose (e.g., with sulfur (S), selenium (Se), or alkylene, such as, e.g., methylene or ethylene); addition of a double bond (e.g., to replace ribose with cyclopentenyl or cyclohexenyl); ring contraction of ribose (e.g., to form a 4-membered ring of cyclobutane or oxetane); ring expansion of ribose (e.g., to form a 6- or 7-membered ring having an additional carbon or heteroatom, such as for example, anhydrohexitol, altritol, mannitol, cyclohexanyl, cyclohexenyl, and morpholino that also has a phosphoramidate backbone). Although the majority of sugar analog alterations are localized to the 2′ position, other sites are amenable to modification, including the 4′ position. In certain embodiments, a gRNA comprises a 4′-S, 4′-Se or a 4′-C-aminomethyl-2′-O-Me modification.

[0735] In certain embodiments, deaza nucleotides, e.g., 7-deaza-adenosine, can be incorporated into a gRNA. In certain embodiments, O- and N-alkylated nucleotides, e.g., N6-methyl adenosine, can be incorporated into a gRNA. In certain embodiments, one or more or all of the nucleotides in a gRNA are deoxynucleotides.

[0736] Guide RNAs can also include one or more cross-links between complementary regions of the crRNA (at its 3′ end) and the tracrRNA (at its 5′ end) (e.g., within a “tetraloop” structure and/or positioned in any stem loop structure occurring within a gRNA). A variety of linkers are suitable for use. For example, guide RNAs can include common linking moieties including, without limitation, polyvinylether, polyethylene, polypropylene, polyethylene glycol (PEG), polyvinyl alcohol (PVA), polyglycolide (PGA), polylactide (PLA), polycaprolactone (PCL), and copolymers thereof.

[0737] In some embodiments, a bifunctional cross-linker is used to link a 5′ end of a first gRNA fragment and a 3′ end of a second gRNA fragment, and the 3′ or 5′ ends of the gRNA fragments to be linked are modified with functional groups that react with the reactive groups of the cross-linker. In general, these modifications comprise one or more of amine, sulfhydryl, carboxyl, hydroxyl, alkene (e.g., a terminal alkene), azide and/or another suitable functional group. Multifunctional (e.g. bifunctional) cross-linkers are also generally known in the art, and may be either heterofunctional or homofunctional, and may include any suitable functional group, including without limitation isothiocyanate, isocyanate, acyl azide, an NHS ester, sulfonyl chloride, tosyl ester, tresyl ester, aldehyde, amine, epoxide, carbonate (e.g., Bis(p-nitrophenyl) carbonate), aryl halide, alkyl halide, imido ester, carboxylate, alkyl phosphate, anhydride, fluorophenyl ester, HOBt ester, hydroxymethyl phosphine, O-methylisourea, DSC, NHS carbamate, glutaraldehyde, activated double bond, cyclic hemiacetal, NHS carbonate, imidazole carbamate, acyl imidazole, methylpyridinium ether, azlactone, cyanate ester, cyclic imidocarbonate, chlorotriazine, dehydroazepine, 6-sulfo-cytosine derivatives, maleimide, aziridine, TNB thiol, Ellman's reagent, peroxide, vinylsulfone, phenylthioester, diazoalkanes, diazoacetyl, epoxide, diazonium, benzophenone, anthraquinone, diazo derivatives, diazirine derivatives, psoralen derivatives, alkene, phenyl boronic acid, etc. In some embodiments, a first gRNA fragment comprises a first reactive group and the second gRNA fragment comprises a second reactive group. For example, the first and second reactive groups can each comprise an amine moiety, which are crosslinked with a carbonate-containing bifunctional crosslinking reagent to form a urea linkage. In other instances, (a) the first reactive group comprises a bromoacetyl moiety and the second reactive group comprises a sulfhydryl moiety, or (b) the first reactive group comprises a sulfhydryl moiety and the second reactive group comprises a bromoacetyl moiety, which are crosslinked by reacting the bromoacetyl moiety with the sulfhydryl moiety to form a bromoacetyl-thiol linkage. These and other cross-linking chemistries are known in the art, and are summarized in the literature, including by Greg T. Hermanson, Bioconjugate Techniques, 3rd Ed. 2013, published by Academic Press.

[0738] Additional suitable gRNA modifications will be apparent to those of ordinary skill in the art based on the present disclosure. Suitable gRNA modifications include, for example, those described in PCT Publication No. WO2019070762A1 entitled “MODIFIED CPF1 GUIDE RNA;” in PCT Publication No. WO2016089433A1 entitled “GUIDE RNA WITH CHEMICAL MODIFICATIONS;” in PCT Publication No. WO2016164356A1 entitled “CHEMICALLY MODIFIED GUIDE RNAS FOR CRISPR/CAS-MEDIATED GENE REGULATION;” and in PCT Publication No. WO2017053729A1 entitled “NUCLEASE-MEDIATED GENOME EDITING OF PRIMARY CELLS AND ENRICHMENT THEREOF;” the entire contents of each of which are incorporated herein by reference.

[0739] Exemplary gRNAs

[0740] Non-limiting examples of guide RNAs suitable for certain embodiments embraced by the present disclosure are provided herein, for example, in the Tables below. Those of ordinary skill in the art will be able to envision suitable guide RNA sequences for a specific nuclease, e.g., a Cas9 or Cpf1 nuclease, from the disclosure of the targeting domain sequence, either as a DNA or RNA sequence. For example, a guide RNA comprising a targeting sequence consisting of RNA nucleotides would include the RNA sequence corresponding to the targeting domain sequence provided as a DNA sequence, and this contain uracil instead of thymidine nucleotides. For example, a guide RNA comprising a targeting domain sequence consisting of RNA nucleotides, and described by the DNA sequence TCTGCAGAAATGTTCCCCGT (SEQ ID NO: 88) would have a targeting domain of the corresponding RNA sequence UCUGCAGAAAUGUUCCCCGU (SEQ ID NO: 89). As will be apparent to the skilled artisan, such a targeting sequence would be linked to a suitable guide RNA scaffold, e.g., a crRNA scaffold sequence or a chimeric crRNA/tracrRNA scaffold sequence. Suitable gRNA scaffold sequences are known to those of ordinary skill in the art. For AsCpf1, for example, a suitable scaffold sequence comprises the sequence UAAUUUCUACUCUUGUAGAU (SEQ ID NO: 90), added to the 5′-terminus of the targeting domain. In the example above, this would result in a Cpf1 guide RNA of the sequence UAAUUUCUACUCUUGUAGAUUCUGCAGAAAUGUUCCCCGU (SEQ ID NO: 91). Those of skill in the art would further understand how to modify such a guide RNA, e.g., by adding a DNA extension (e.g., in the example above, adding a 25-mer DNA extension as described herein would result, for example, in a guide RNA of the sequence ATGTGTTTTTGTCAAAAGACCTTTTrUrArArUrUrUrCrUrArCrUrCrUrUrGrUrArGrArUrUr CrUrGrCrArGrArArArUrGrUrUrCrCrCrCrGrU (SEQ ID NO: 92)). It will be understood that the exemplary targeting sequences provided herein are not limiting, and additional suitable sequences, e.g., variants of the specific sequences disclosed herein, will be apparent to the skilled artisan based on the present disclosure in view of the general knowledge in the art.

[0741] It will be understood that the exemplary gRNAs disclosed herein are provided to illustrate non-limiting embodiments embraced by the present disclosure. Additional suitable gRNA sequences will be apparent to the skilled artisan based on the present disclosure, and the disclosure is not limited in this respect.

### Target Cells

[0742] Methods of the disclosure can be used to edit the genome of any cell. In certain embodiments, the target cell is a stem cell, e.g., an iPS or ES cell. In certain embodiments, the target cell can be an iPS- or ES-derived cell, where the genetic modification is made at any stage during the reprogramming process from donor cell to iPSC, during the iPSC stage, and/or at any stage of the process of differentiating the iPSC or ESC to a specialized cell, or even up to or at the final specialized cell state. In certain embodiments, the target cell can be an iPS-derived NK cell (iNK cell) or iPS-derived T cell (iT cell) where the genetic modification is made at any stage during the reprogramming process from donor cell to iPSC, during the iPSC stage, and/or at any stage of the process of differentiating the iPSC to an iNK or iT state, e.g., at an intermediary state, such as, for example, an iPSC-derived HSC state, or even up to or at the final iNK or iT cell state.

[0743] In certain embodiments, a target cell is one or more of a long-term hematopoietic stem cell, a short term hematopoietic stem cell, a multipotent progenitor cell, a lineage restricted progenitor cell, a lymphoid progenitor cell, a myeloid progenitor cell, a common myeloid progenitor cell, an erythroid progenitor cell, a megakaryocyte erythroid progenitor cell, a retinal cell, a photoreceptor cell, a rod cell, a cone cell, a retinal pigmented epithelium cell, a trabecular meshwork cell, a cochlear hair cell, an outer hair cell, an inner hair cell, a pulmonary epithelial cell, a bronchial epithelial cell, an alveolar epithelial cell, a pulmonary epithelial progenitor cell, a striated muscle cell, a cardiac muscle cell, a muscle satellite cell, a neuron, a neuronal stem cell, a mesenchymal stem cell, an induced pluripotent stem (iPS) cell, an embryonic stem cell, a fibroblast, a monocyte-derived macrophage or dendritic cell, a megakaryocyte, a neutrophil, an eosinophil, a basophil, a mast cell, a reticulocyte, a B cell, e.g., a progenitor B cell, a Pre B cell, a Pro B cell, a memory B cell, a plasma B cell, a gastrointestinal epithelial cell, a biliary epithelial cell, a pancreatic ductal epithelial cell, an intestinal stem cell, a hepatocyte, a liver stellate cell, a Kupffer cell, an osteoblast, an osteoclast, an adipocyte, a preadipocyte, a pancreatic islet cell (e.g., a beta cell, an alpha cell, a delta cell), a pancreatic exocrine cell, a Schwann cell, or an oligodendrocyte. In some embodiments, a target cell is a neuronal progenitor cell. In some embodiments, a target cell is a neuron.

[0744] In some embodiments, a target cell is a circulating blood cell, e.g., a reticulocyte, megakaryocyte erythroid progenitor (MEP) cell, myeloid progenitor cell (CMP/GMP), lymphoid progenitor (LP) cell, hematopoietic stem/progenitor cell (HSC), or endothelial cell (EC). In some embodiments, a target cell is one or more of a bone marrow cell (e.g., a reticulocyte, an erythroid cell (e.g., erythroblast), an MEP cell, myeloid progenitor cell (CMP/GMP), LP cell, erythroid progenitor (EP) cell, HSC, multipotent progenitor (MPP) cell, endothelial cell (EC), hemogenic endothelial (HE) cell, or mesenchymal stem cell). In some embodiments, a target cell is one or more of a myeloid progenitor cell (e.g., a common myeloid progenitor (CMP) cell or granulocyte macrophage progenitor (GMP) cell). In some embodiments, a target cell is a lymphoid progenitor cell, e.g., a common lymphoid progenitor (CLP) cell. In some embodiments, a target cell is one or more of an erythroid progenitor cell (e.g., an MEP cell). In some embodiments, a target cell is one or more of a hematopoietic stem/progenitor cell (e.g., a long term HSC (LT-HSC), short term HSC (ST-HSC), MPP cell, or lineage restricted progenitor (LRP) cell). In certain embodiments, the target cell is a CD34⁺ cell, CD34⁺CD90⁺ cell, CD34⁺CD38⁻ cell, CD34⁺CD90⁺CD49f⁺CD38⁻CD45RA⁻ cell, CD105⁺ cell, CD31⁺, or CD133⁺ cell, or a CD34⁺CD90⁺ CD133⁺ cell. In some embodiments, a target cell is one or more of an umbilical cord blood CD34⁺ HSPC, umbilical cord venous endothelial cell, umbilical cord arterial endothelial cell, amniotic fluid CD34⁺ cell, amniotic fluid endothelial cell, placental endothelial cell, or placental hematopoietic CD34⁺ cell. In some embodiments, a target cell is one or more of a mobilized peripheral blood hematopoietic CD34⁺ cell (after the subject is treated with a mobilization agent, e.g., G-CSF or Plerixafor). In some embodiments, a target cell is a peripheral blood endothelial cell. In some embodiments, a target cell is a peripheral blood natural killer cell.

[0745] In certain embodiments, a target cell is a primary cell, e.g., a cell isolated from a human subject. In certain embodiments, a target cell is an immune cell, e.g., a primary immune cell isolated from a human subject. In certain embodiments, a target cell is part of a population of cells isolated from a subject, e.g., a human subject. In some embodiments, the population of cells comprises a population of immune cells isolated from a subject. In some embodiments, the population of cells comprises tumor infiltrating lymphocytes (TILs), e.g., TILs isolated from a human subject. In some embodiments, a target cell is isolated from a healthy subject, e.g., a healthy human donor. In some embodiments, a target cell is isolated from a subject having a disease or illness, e.g., a human patient in need of a treatment.

[0746] In certain embodiments, a target cell is an immune cell, e.g., a primary immune cell, e.g., a CD8⁺ T cell, a CD8⁺ naïve T cell, a CD4⁺ central memory T cell, a CD8⁺ central memory T cell, a CD4⁺ effector memory T cell, a CD4⁺ effector memory T cell, a CD4⁺ T cell, a CD4⁺ stem cell memory T cell, a CD8⁺ stem cell memory T cell, a CD4⁺ helper T cell, a regulatory T cell, a cytotoxic T cell, a natural killer T cell, a CD4⁺ naïve T cell, a TH17 CD4⁺ T cell, a TH1 CD4⁺ T cell, a TH2 CD4⁺ T cell, a TH9 CD4⁺ T cell, a CD4⁺Foxp3⁺ T cell, a CD4⁺CD25⁺ CD127⁻ T cell, or a CD4⁺CD25⁺ CD127⁻ Foxp3⁺ T cell. In some embodiments, a target cell is an alpha-beta T cell, a gamma-delta T cell or a Treg. In some embodiments a target cell is macrophage. In some embodiments, a target cell is an innate lymphoid cell. In some embodiments, a target cell is a dendritic cell. In some embodiments, a target cell is a beta cell, e.g., a pancreatic beta cell.

[0747] In some embodiments, a target cell is isolated from a subject having a cancer.

[0748] In some embodiments, a target cell is isolated from a subject having a cancer, including but not limited to, acoustic neuroma; adenocarcinoma; adrenal gland cancer; anal cancer; angiosarcoma (e.g., lymphangiosarcoma, lymphangioendotheliosarcoma, hemangiosarcoma); appendix cancer; benign monoclonal gammopathy; biliary cancer (e.g., cholangiocarcinoma); bile duct cancer; bladder cancer; bone cancer; breast cancer (e.g., adenocarcinoma of the breast, papillary carcinoma of the breast, mammary cancer, medullary carcinoma of the breast); brain cancer (e.g., meningioma, glioblastomas, glioma (e.g., astrocytoma, oligodendroglioma, medulloblastoma); bronchus cancer; carcinoid tumor; cardiac tumor; cervical cancer (e.g., cervical adenocarcinoma); choriocarcinoma; chordoma; craniopharyngioma; colorectal cancer (e.g., colon cancer, rectal cancer, colorectal adenocarcinoma); connective tissue cancer; epithelial carcinoma; ductal carcinoma in situ; ependymoma; endotheliosarcoma (e.g., Kaposi's sarcoma, multiple idiopathic hemorrhagic sarcoma); endometrial cancer (e.g., uterine cancer, uterine sarcoma); esophageal cancer (e.g., adenocarcinoma of the esophagus, Barrett's adenocarcinoma); Ewing's sarcoma; eye cancer (e.g., intraocular melanoma, retinoblastoma); familiar hypereosinophilia; gall bladder cancer; gastric cancer (e.g., stomach adenocarcinoma); gastrointestinal stromal tumor (GIST); germ cell cancer; head and neck cancer (e.g., head and neck squamous cell carcinoma, oral cancer (e.g., oral squamous cell carcinoma), throat cancer (e.g., laryngeal cancer, pharyngeal cancer, nasopharyngeal cancer, oropharyngeal cancer); hematopoietic cancer (e.g., lymphomas, primary pulmonary lymphomas, bronchus-associated lymphoid tissue lymphomas, splenic lymphomas, nodal marginal zone lymphomas, pediatric B cell non-Hodgkin lymphomas); hemangioblastoma; histiocytosis; hypopharynx cancer; inflammatory myofibroblastic tumors; immunocytic amyloidosis; kidney cancer (e.g., nephroblastoma a.k.a. Wilms' tumor, renal cell carcinoma); liver cancer (e.g., hepatocellular cancer (HCC), malignant hepatoma); lung cancer (e.g., bronchogenic carcinoma, small cell lung cancer (SCLC), non-small cell lung cancer (NSCLC), adenocarcinoma of the lung); leiomyosarcoma (LMS); melanoma; midline tract carcinoma; multiple endocrine neoplasia syndrome; muscle cancer; mesothelioma; nasopharynx cancer; neuroblastoma; neurofibroma (e.g., neurofibromatosis (NF) type 1 or type 2, schwannomatosis); neuroendocrine cancer (e.g., gastroenteropancreatic neuroendocrine tumor (GEP-NET), carcinoid tumor); osteosarcoma (e.g., bone cancer); ovarian cancer (e.g., cystadenocarcinoma, ovarian embryonal carcinoma, ovarian adenocarcinoma); papillary adenocarcinoma; pancreatic cancer (e.g., pancreatic adenocarcinoma, intraductal papillary mucinous neoplasm (IPMN), Islet cell tumors); parathyroid cancer; papillary adenocarcinoma; penile cancer (e.g., Paget's disease of the penis and scrotum); pharyngeal cancer; pinealoma; pituitary cancer; pleuropulmonary blastoma; primitive neuroectodermal tumor (PNT); plasma cell neoplasia; paraneoplastic syndromes; intraepithelial neoplasms; prostate cancer (e.g., prostate adenocarcinoma); rectal cancer; rhabdomyosarcoma; retinoblastoma; salivary gland cancer; skin cancer (e.g., squamous cell carcinoma (SCC), keratoacanthoma (KA), melanoma, basal cell carcinoma (BCC)); small bowel cancer (e.g., appendix cancer); soft tissue sarcoma (e.g., malignant fibrous histiocytoma (WE), liposarcoma, malignant peripheral nerve sheath tumor (MPNST), chondrosarcoma, fibrosarcoma, myxosarcoma); sebaceous gland carcinoma; stomach cancer; small intestine cancer; sweat gland carcinoma; synovioma; testicular cancer (e.g., seminoma, testicular embryonal carcinoma); thymic cancer; thyroid cancer (e.g., papillary carcinoma of the thyroid, papillary thyroid carcinoma (PTC), medullary thyroid cancer); urethral cancer; uterine cancer; vaginal cancer; vulvar cancer (e.g., Paget's disease of the vulva), or any combination thereof.

[0749] In some embodiments, a target cell is isolated from a subject having a hematological disorder. In some embodiments, a target cell is isolated form a subject having sickle cell anemia. In some embodiments, a target cell is isolated from a subject having β-thalassemia.

### Stem Cells

[0750] Methods of the disclosure can be used with stem cells. Stem cells are typically cells that have the capacity to produce unaltered daughter cells (self-renewal; cell division produces at least one daughter cell that is identical to the parent cell) and to give rise to specialized cell types (potency). Stem cells include, but are not limited to, embryonic stem (ES) cells, embryonic germ (EG) cells, germline stem (GS) cells, human mesenchymal stem cells (hMSCs), adipose tissue-derived stem cells (ADSCs), multipotent adult progenitor cells (MAPCs), multipotent adult germline stem cells (maGSCs) and unrestricted somatic stem cell (USSCs). Generally, stem cells can divide without limit. After division, the stem cell may remain as a stem cell, become a precursor cell, or proceed to terminal differentiation. A precursor cell is a cell that can generate a fully differentiated functional cell of at least one given cell type. Generally, precursor cells can divide. After division, a precursor cell can remain a precursor cell, or may proceed to terminal differentiation.

[0751] Pluripotent stem cells are generally known in the art. The present disclosure provides technologies (e.g., systems, compositions, methods, etc.) related to pluripotent stem cells. In some embodiments, pluripotent stem cells are stem cells that: (a) are capable of inducing teratomas when transplanted in immunodeficient (SCID) mice; (b) are capable of differentiating to cell types of all three germ layers (e.g., can differentiate to ectodermal, mesodermal, and endodermal cell types); and/or (c) express one or more markers of embryonic stem cells (e.g., human embryonic stem cells express Oct-4, alkaline phosphatase, SSEA-3 surface antigen, SSEA-4 surface antigen, nanog, TRA-1-60, TRA-1-81, Sox-2, REX1, etc.). In some aspects, human pluripotent stem cells do not show expression of differentiation markers. In some embodiments, ES cells and/or iPSCs edited using methods of the disclosure maintain their pluripotency, e.g., (a) are capable of inducing teratomas when transplanted in immunodeficient (SCID) mice; (b) are capable of differentiating to cell types of all three germ layers, e.g., can differentiate to ectodermal, mesodermal, and endodermal cell types); and/or (c) express one or more markers of embryonic stem cells.

[0752] In some embodiments, ES cells (e.g., human ES cells) can be derived from the inner cell mass of blastocysts or morulae. In some embodiments, ES cells can be isolated from one or more blastomeres of an embryo, e.g., without destroying the remainder of the embryo. In some embodiments, ES cells can be produced by somatic cell nuclear transfer. In some embodiments, ES cells can be derived from fertilization of an egg cell with sperm or DNA, nuclear transfer, parthenogenesis, or by means to generate ES cells, e.g., with homozygosity in the HLA region. In some embodiments, human ES cells can be produced or derived from a zygote, blastomeres, or blastocyst-staged mammalian embryo produced by the fusion of a sperm and egg cell, nuclear transfer, parthenogenesis, or the reprogramming of chromatin and subsequent incorporation of the reprogrammed chromatin into a plasma membrane to produce an embryonic cell. Exemplary human ES cells are known in the art and include, but are not limited to, MAO1, MAO9, ACT-4, No. 3, H1, H7, H9, H14 and ACT30 ES cells. In some embodiments, human ES cells, regardless of their source or the particular method used to produce them, can be identified based on, e.g., (i) the ability to differentiate into cells of all three germ layers, (ii) expression of at least Oct-4 and alkaline phosphatase, and/or (iii) ability to produce teratomas when transplanted into immunocompromised animals. In some embodiments, ES cells have been serially passaged as cell lines.

[0753] iPS Cells

[0754] Induced pluripotent stem cells (iPSC) are a type of pluripotent stem cell artificially derived from a non-pluripotent cell, such as an adult somatic cell (e.g., a fibroblast cell or other suitable somatic cell), by inducing expression of certain genes. iPSCs can be derived from any organism, such as a mammal. In some embodiments, iPSCs are produced from mice, rats, rabbits, guinea pigs, goats, pigs, cows, non-human primates or humans. iPSCs are similar to ES cells in many respects, such as the expression of certain stem cell genes and proteins, chromatin methylation patterns, doubling time, embryoid body formation, teratoma formation, viable chimera formation, potency and/or differentiability. Various suitable methods for producing iPSCs are known in the art. In some embodiments, iPSCs can be derived by transfection of certain stem cell-associated genes (such as Oct-3/4 (Pouf51) and Sox-2) into non-pluripotent cells, such as adult fibroblasts. Transfection can be achieved through viral vectors, such as retroviruses, lentiviruses, or adenoviruses. Additional suitable reprogramming methods include the use of vectors that do not integrate into the genome of the host cell, e.g., episomal vectors, or the delivery of reprogramming factors directly via encoding RNA or as proteins has also been described. For example, cells can be transfected with Oct-3/4, Sox-2, Klf4, and/or c-Myc using a retroviral system or with Oct-4, Sox-2, NANOG, and/or LIN28 using a lentiviral system. After 3-4 weeks, small numbers of transfected cells begin to become morphologically and biochemically similar to pluripotent stem cells, and can be isolated through morphological selection, doubling time, or through a reporter gene and antibiotic selection. In one example, iPSCs from adult human cells are generated by the method described by Yu et al., Science 2007; 318(5854):1224 or Takahashi et al., Cell 2007; 131:861-72. Numerous suitable methods for reprogramming are known to those of skill in the art, and the present disclosure is not limited in this respect.

[0755] In some embodiments, a target cell for the editing and cargo integration methods described herein is an iPSC, wherein the edited iPSC is then differentiated, e.g., into an iPSC-derived immune cell. In some embodiments, the differentiated cell is an iPSC-derived immune cell. In some embodiments, the differentiated cell is an iPSC-derived iNK cell, an iPSC-derived T cell (e.g., an iPSC-derived alpha-beta T cell, gamma-delta T cell, Treg, CD4+ T cell, or CD8+ T cell), an iPSC-derived dendritic cell, or an iPSC-derived macrophage. In some embodiments, the differentiated cell is an iPSC-derived pancreatic beta cell.

[0756] iNK Cells

[0757] In some embodiments, the present disclosure provides methods of generating iNK cells (e.g., genetically modified iNK cells).

[0758] In some embodiments, genetic modifications present in an iNK cell of the present disclosure can be made at any stage during the reprogramming process from donor cell to iPSC, during the iPSC stage, and/or at any stage of the process of differentiating the iPSC to an iNK state, e.g., at an intermediary state, such as, for example, an iPSC-derived HSC state, or even up to or at the final iNK cell state.

[0759] For example, one or more genomic modifications present in a genetically modified iNK cell of the present disclosure may be made at one or more different cell stages (e.g., reprogramming from donor to iPSC, differentiation of iPSC to iNK). In some embodiments, one or more genomic modifications present in a genetically modified iNK cell provided herein is made before reprogramming a donor cell to an iPSC state. In some embodiments, all edits present in a genetically modified iNK cell provided herein are made at the same time, in close temporal proximity, and/or at the same cell stage of the reprogramming/differentiation process, e.g., at the donor cell stage, during the reprogramming process, at the iPSC stage, or during the differentiation process, e.g., from iPSC to iNK. In some embodiments, two or more edits present in a genetically modified iNK cell provided herein are made at different times and/or at different cell stages of the reprogramming/differentiation process from donor cell to iPSC to iNK. For example, in some embodiments, a first edit is made at the donor cell stage and a second (different) edit is made at the iPSC stage. In some embodiments, a first edit is made at the reprogramming stage (e.g., donor to iPSC) and a second (different) edit is made at the iPSC stage.

[0760] A variety of cell types can be used as a donor cell that can be subjected to reprogramming, differentiation, and/or genetic engineering strategies described herein. For example, the donor cell can be a pluripotent stem cell or a differentiated cell, e.g., a somatic cell, such as, for example, a fibroblast or a T lymphocyte. In some embodiments, donor cells are manipulated (e.g., subjected to reprogramming, differentiation, and/or genetic engineering) to generate iNK cells described herein.

[0761] A donor cell can be from any suitable organism. For example, in some embodiments, the donor cell is a mammalian cell, e.g., a human cell or a non-human primate cell. In some embodiments, the donor cell is a somatic cell. In some embodiments, the donor cell is a stem cell or progenitor cell. In certain embodiments, the donor cell is not or was not part of a human embryo and its derivation does not involve destruction of a human embryo.

[0762] In some embodiments, a genetically modified iNK cell is derived from an iPSC, which in turn is derived from a somatic donor cell. Any suitable somatic cell can be used in the generation of iPSCs, and in turn, the generation of iNK cells. Suitable strategies for deriving iPSCs from various somatic donor cell types have been described and are known in the art. In some embodiments, a somatic donor cell is a fibroblast cell. In some embodiments, a somatic donor cell is a mature T cell.

[0763] For example, in some embodiments, a somatic donor cell, from which an iPSC, and subsequently an iNK cell is derived, is a developmentally mature T cell (a T cell that has undergone thymic selection). One hallmark of developmentally mature T cells is a rearranged T cell receptor locus. During T cell maturation, the TCR locus undergoes V(D)J rearrangements to generate complete V-domain exons. These rearrangements are retained throughout reprogramming of a T cells to an iPSC, and throughout differentiation of the resulting iPSC to a somatic cell.

[0764] In certain embodiments, a somatic donor cell is a CD8⁺ T cell, a CD8⁺ naïve T cell, a CD4⁺ central memory T cell, a CD8⁺ central memory T cell, a CD4⁺ effector memory T cell, a CD4⁺ effector memory T cell, a CD4⁺ T cell, a CD4⁺ stem cell memory T cell, a CD8⁺ stem cell memory T cell, a CD4⁺ helper T cell, a regulatory T cell, a cytotoxic T cell, a natural killer T cell, a CD4⁺ naïve T cell, a TH17 CD4⁺ T cell, a TH1 CD4⁺ T cell, a TH2 CD4⁺ T cell, a TH9 CD4⁺ T cell, a CD4⁺Foxp3⁺ T cell, a CD4⁺CD25⁺ CD127⁻ T cell, or a CD4⁺CD25⁺ CD127⁻ Foxp3⁺ T cell.

[0765] T cells can be advantageous for the generation of iPSCs. For example, T cells can be edited with relative ease, e.g., by CRISPR-based methods or other genetic engineering methods. Additionally, the rearranged TCR locus allows for genetic tracking of individual cells and their daughter cells. For example, if the reprogramming, expansion, culture, and/or differentiation strategies involved in the generation of NK cells a clonal expansion of a single cell, the rearranged TCR locus can be used as a genetic marker unambiguously identifying a cell and its daughter cells. This, in turn, allows for the characterization of a cell population as truly clonal, or for the identification of mixed populations, or contaminating cells in a clonal population. Another potential advantage of using T cells in generating iNK cells carrying multiple edits is that certain karyotypic aberrations associated with chromosomal translocations are selected against in T cell culture. Such aberrations can pose a concern when editing cells by CRISPR technology, and in particular when generating cells carrying multiple edits. Using T cell derived iPSCs as a starting point for the derivation of therapeutic lymphocytes can allow for the expression of a pre-screened TCR in the lymphocytes, e.g., via selecting the T cells for binding activity against a specific antigen, e.g., a tumor antigen, reprogramming the selected T cells to iPSCs, and then deriving lymphocytes from these iPSCs that express the TCR (e.g., T cells). This strategy can allow for activating the TCR in other cell types, e.g., by genetic or epigenetic strategies. Additionally, T cells retain at least part of their “epigenetic memory” throughout the reprogramming process, and thus subsequent differentiation of the same or a closely related cell type, such as iNK cells can be more efficient and/or result in higher quality cell populations as compared to approaches using non-related cells, such as fibroblasts, as a starting point for iNK derivation.

[0766] In some embodiments, a donor cell being manipulated, e.g., a cell being reprogrammed and/or undergoing genetic engineering as described herein, is one or more of a long-term hematopoietic stem cell, a short term hematopoietic stem cell, a multipotent progenitor cell, a lineage restricted progenitor cell, a lymphoid progenitor cell, a myeloid progenitor cell, a common myeloid progenitor cell, an erythroid progenitor cell, a megakaryocyte erythroid progenitor cell, a retinal cell, a photoreceptor cell, a rod cell, a cone cell, a retinal pigmented epithelium cell, a trabecular meshwork cell, a cochlear hair cell, an outer hair cell, an inner hair cell, a pulmonary epithelial cell, a bronchial epithelial cell, an alveolar epithelial cell, a pulmonary epithelial progenitor cell, a striated muscle cell, a cardiac muscle cell, a muscle satellite cell, a neuron, a neuronal stem cell, a mesenchymal stem cell, an induced pluripotent stem (iPS) cell, an embryonic stem cell, a fibroblast, a monocyte-derived macrophage or dendritic cell, a megakaryocyte, a neutrophil, an eosinophil, a basophil, a mast cell, a reticulocyte, a B cell, e.g., a progenitor B cell, a Pre B cell, a Pro B cell, a memory B cell, a plasma B cell, a gastrointestinal epithelial cell, a biliary epithelial cell, a pancreatic ductal epithelial cell, an intestinal stem cell, a hepatocyte, a liver stellate cell, a Kupffer cell, an osteoblast, an osteoclast, an adipocyte, a preadipocyte, a pancreatic islet cell (e.g., a beta cell, an alpha cell, a delta cell), a pancreatic exocrine cell, a Schwann cell, or an oligodendrocyte.

[0767] In some embodiments, a donor cell is one or more of a circulating blood cell, e.g., a reticulocyte, megakaryocyte erythroid progenitor (MEP) cell, myeloid progenitor cell (CMP/GMP), lymphoid progenitor (LP) cell, hematopoietic stem/progenitor cell (HSC), or endothelial cell (EC). In some embodiments, a donor cell is one or more of a bone marrow cell (e.g., a reticulocyte, an erythroid cell (e.g., erythroblast), an MEP cell, myeloid progenitor cell (CMP/GMP), LP cell, erythroid progenitor (EP) cell, HSC, multipotent progenitor (MPP) cell, endothelial cell (EC), hemogenic endothelial (HE) cell, or mesenchymal stem cell). In some embodiments, a donor cell is one or more of a myeloid progenitor cell (e.g., a common myeloid progenitor (CMP) cell or granulocyte macrophage progenitor (GMP) cell). In some embodiments, a donor cell is one or more of a lymphoid progenitor cell, e.g., a common lymphoid progenitor (CLP) cell. In some embodiments, a donor cell is one or more of an erythroid progenitor cell (e.g., an MEP cell). In some embodiments, a donor cell is one or more of a hematopoietic stem/progenitor cell (e.g., a long term HSC (LT-HSC), short term HSC (ST-HSC), MPP cell, or lineage restricted progenitor (LRP) cell). In certain embodiments, the donor cell is a CD34⁺ cell, CD34⁺CD90⁺ cell, CD34⁺CD38⁻ cell, CD34⁺CD90⁺CD49f⁺CD38⁻CD45RA⁻ cell, CD105⁺ cell, CD31⁺, or CD133⁺ cell, or a CD34⁺CD90⁺ CD133⁺ cell. In some embodiments, a donor cell is one or more of an umbilical cord blood CD34⁺ HSPC, umbilical cord venous endothelial cell, umbilical cord arterial endothelial cell, amniotic fluid CD34⁺ cell, amniotic fluid endothelial cell, placental endothelial cell, or placental hematopoietic CD34⁺ cell. In some embodiments, a donor cell is one or more of a mobilized peripheral blood hematopoietic CD34⁺ cell (after the subject is treated with a mobilization agent, e.g., G-CSF or Plerixafor). In some embodiments, a donor cell is a peripheral blood endothelial cell. In some embodiments, a donor cell is a peripheral blood natural killer cell.

[0768] In some embodiments, a donor cell is a dividing cell. In some embodiments, a donor cell is a non-dividing cell.

[0769] In some embodiments, a genetically modified (e.g., edited) iNK cell resulting from one or more methods and/or strategies described herein, are administered to a subject in need thereof, e.g., in the context of an immuno-oncology therapeutic approach. In some embodiments, donor cells, or any cells of any stage of the reprogramming, differentiating, and/or genetic engineering strategies provided herein, can be maintained in culture or stored (e.g., frozen in liquid nitrogen) using any suitable method known in the art, e.g., for subsequent characterization or administration to a subject in need thereof.

### Methods of Characterization

[0770] Methods of characterizing cells including characterizing cellular phenotype are known to those of skill in the art. In some embodiments, one or more such methods may include, but not be limited to, for example, morphological analyses and flow cytometry. Cellular lineage and identity markers are known to those of skill in the art. One or more such markers may be combined with one or more characterization methods to determine a composition of a cell population or phenotypic identity of one or more cells. For example, in some embodiments, cells of a particular population will be characterized using flow cytometry (for example, see Ye Li et al., Cell Stem Cell. 2018 Aug. 2; 23(2): 181-192.e5). In some such embodiments, a sample of a population of cells will be evaluated for presence and proportion of one or more cell surface markers and/or one or more intracellular markers. As will be understood by those of skill in the art, such cell surface markers may be representative of different lineages. For example, pluripotent cells may be identified by one or more of any number of markers known to be associated with such cells, such as, for example, CD34. Further, in some embodiments, cells may be identified by markers that indicate some degree of differentiation. Such markers will be known to one of skill in the art. For example, in some embodiments, markers of differentiated cells may include those associated with differentiated hematopoietic cells such as, e.g., CD43, CD45 (differentiated hematopoietic cells). In some embodiments, markers of differentiated cells may be associated with NK cell phenotypes such as, e.g., CD56, NK cell receptor immunoglobulin gamma Fc region receptor III (FcγRIII, cluster of differentiation 16 (CD16)), natural killer group-2 member D (NKG2D), CD69, a natural cytotoxicity receptor, etc. In some embodiments, markers may be T cell markers (e.g., CD3, CD4, CD8, etc.).

### Methods of Use

[0771] A variety of diseases, disorders and/or conditions may be treated through use of cells provided by the present disclosure. For example, in some embodiments, a disease, disorder and/or condition may be treated by introducing genetically modified or engineered cells as described herein (e.g., genetically modified iNK cells) to a subject. Examples of diseases that may be treated include, but are not limited to, cancer, e.g., solid tumors, e.g., of the brain, prostate, breast, lung, colon, uterus, skin, liver, bone, pancreas, ovary, testes, bladder, kidney, head, neck, stomach, cervix, rectum, larynx, or esophagus; and hematological malignancies, e.g., acute and chronic leukemias, lymphomas, multiple myeloma and myelodysplastic syndromes.

[0772] In some embodiments, the present disclosure provides methods of treating a subject in need thereof by administering to the subject a composition comprising any of the cells described herein. In some embodiments, a therapeutic agent or composition may be administered before, during, or after the onset of a disease, disorder, or condition (including, e.g., an injury). In some embodiments, the present disclosure provides any of the cells described herein for use in the preparation of a medicament. In some embodiments, the present disclosure provides any of the cells described herein for use in the treatment of a disease, disorder, or condition, that can be treated by a cell therapy.

[0773] In particular embodiments, the subject has a disease, disorder, or condition, that can be treated by a cell therapy. In some embodiments, a subject in need of cell therapy is a subject with a disease, disorder and/or condition, whereby a cell therapy, e.g., a therapy in which a composition comprising a cell described herein, is administered to the subject, whereby the cell therapy treats at least one symptom associated with the disease, disorder, and/or condition. In some embodiments, a subject in need of cell therapy includes, but is not limited to, a candidate for bone marrow or stem cell transplant, a subject who has received chemotherapy or irradiation therapy, a subject who has or is at risk of having cancer, e.g., a cancer of hematopoietic system, a subject having or at risk of developing a tumor, e.g., a solid tumor, and/or a subject who has or is at risk of having a viral infection or a disease associated with a viral infection.

[0774] Pharmaceutical Compositions

[0775] In some embodiments, the present disclosure provides pharmaceutical compositions comprising one or more genetically modified or engineered cells described herein, e.g., a genetically modified iNK cell described herein. In some embodiments, a pharmaceutical composition further comprises a pharmaceutically acceptable excipient. In some embodiments, a pharmaceutical composition comprises isolated pluripotent stem cell-derived hematopoietic lineage cells comprising at least 50%, 60%, 70%, 80%, 90%, 95%, 98%, or 99% T cells, NK cells, NKT cells, CD34+HE cells or HSCs, e.g., genetically modified (e.g., edited) T cells, NK cells, NKT cells, CD34+HE cells or HSCs. In some embodiments, a pharmaceutical composition comprises isolated pluripotent stem cell-derived hematopoietic lineage cells comprising about 95% to about 100% T cells, NK cells, NKT cells, CD34+HE cells or HSCs, e.g., genetically modified (e.g., edited) T cells, NK cells, NKT cells, CD34+HE cells or HSCs.

[0776] In some embodiments, a pharmaceutical composition of the present disclosure comprises an isolated population of pluripotent stem cell-derived hematopoietic lineage cells, wherein the isolated population has less than about 0.1%, 0.5%, 1%, 2%, 5%, 10%, 15%, 20%, 25%, or 30% T cells, NK cells, NKT cells, CD34+HE cells or HSCs, e.g., genetically modified (e.g., edited) T cells, NK cells, NKT cells, CD34+HE cells or HSCs. In some embodiments, an isolated population of pluripotent stem cell-derived hematopoietic lineage cells has more than about 0.1%, 0.5%, 1%, 2%, 5%, 10%, 15%, 20%, 25%, or 30% T cells, NK cells, NKT cells, CD34+HE cells or HSCs, e.g., genetically modified (e.g., edited) T cells, NK cells, NKT cells, CD34+HE cells or HSCs. In some embodiments, an isolated population of pluripotent stem cell-derived hematopoietic lineage cells has about 0.1% to about 1%, about 1% to about 3%, about 3% to about 5%, about 10%-15%, about 15%-20%, about 20%-25%, about 25%-30%, about 30%-35%, about 35%-40%, about 40%-45%, about 45%-50%, about 60%-70%, about 70%-80%, about 80%-90%, about 90%-95%, or about 95% to about 100% T cells, NK cells, NKT cells, CD34+HE cells or HSCs, e.g., genetically modified (e.g., edited) T cells, NK cells, NKT cells, CD34+HE cells or HSCs.

[0777] In some embodiments, an isolated population of pluripotent stem cell-derived hematopoietic lineage cells comprises about 0.1%, about 1%, about 3%, about 5%, about 10%, about 15%, about 20%, about 25%, about 30%, about 35%, about 40%, about 45%, about 50%, about 60%, about 70%, about 80%, about 90%, about 95%, about 98%, about 99%, or about 100% T cells, NK cells, NKT cells, CD34+HE cells or HSCs, e.g., genetically modified (e.g., edited) T cells, NK cells, NKT cells, CD34+HE cells or HSCs.

[0778] As one of ordinary skill in the art would understand, both autologous and allogeneic cells can be used in adoptive cell therapies. Autologous cell therapies generally have reduced infection, low probability for GVHD, and rapid immune reconstitution relative to other cell therapies. Allogeneic cell therapies generally have an immune mediated graft-versus-malignancy (GVM) effect, and low rate of relapse relative to other cell therapies. Based on the specific condition(s) of the subject in need of the cell therapy, one of ordinary skill in the art would be able to determine which specific type of therapy(ies) to administer.

[0779] In some embodiments, a pharmaceutical composition comprises pluripotent stem cell-derived hematopoietic lineage cells that are allogeneic to a subject. In some embodiments, a pharmaceutical composition comprises pluripotent stem cell-derived hematopoietic lineage cells that are autologous to a subject. For autologous transplantation, the isolated population of pluripotent stem cell-derived hematopoietic lineage cells can be either a complete or partial HLA-match with the subject being treated. In some embodiments, the pluripotent stem cell-derived hematopoietic lineage cells are not HLA-matched to a subject.

[0780] In some embodiments, pluripotent stem cell-derived hematopoietic lineage cells can be administered to a subject without being expanded ex vivo or in vitro prior to administration. In particular embodiments, an isolated population of derived hematopoietic lineage cells is modulated and treated ex vivo using one or more agents to obtain immune cells with improved therapeutic potential. In some embodiments, the modulated population of derived hematopoietic lineage cells can be washed to remove the treatment agent(s), and the improved population can be administered to a subject without further expansion of the population in vitro. In some embodiments, an isolated population of derived hematopoietic lineage cells is expanded prior to modulating the isolated population with one or more agents.

[0781] In some embodiments, an isolated population of derived hematopoietic lineage cells can be genetically modified according to the methods of the present disclosure to express a recombinant TCR, CAR or other gene product of interest. For genetically engineered derived hematopoietic lineage cells that express a recombinant TCR or CAR, whether prior to or after genetic modification of the cells, the cells can be activated and expanded using methods as described, for example, in U.S. Pat. Nos. 6,352,694; 6,534,055; 6,905,680; 6,692,964; 5,858,358; 6,887,466; 6,905,681; 7,144,575; 7,067,318; 7,172,869; 7,232,566; 7,175,843; 5,883,223; 6,905,874; 6,797,514; 6,867,041; and U.S. Patent Application Publication No. 20060121005.

[0782] Cancers

[0783] Any cancer can be treated using a cell or pharmaceutical composition described herein. Exemplary therapeutic targets of the present disclosure include cancer cells from the bladder, blood, bone, bone marrow, brain, breast, colon, esophagus, eye, gastrointestinal system, gum, head, kidney, liver, lung, nasopharynx, neck, ovary, prostate, skin, stomach, testis, tongue, or uterus. In addition, a cancer may specifically be of the following non-limiting histological type: neoplasm, malignant; carcinoma; carcinoma, undifferentiated; giant and spindle cell carcinoma; small cell carcinoma; papillary carcinoma; squamous cell carcinoma; lymphoepithelial carcinoma; basal cell carcinoma; pilomatrix carcinoma; transitional cell carcinoma; papillary transitional cell carcinoma; adenocarcinoma; gastrinoma, malignant; cholangiocarcinoma; hepatocellular carcinoma; combined hepatocellular carcinoma and cholangiocarcinoma; trabecular adenocarcinoma; adenoid cystic carcinoma; adenocarcinoma in adenomatous polyp; adenocarcinoma, familial polyposis coli; solid carcinoma; carcinoid tumor, malignant; branchiolo-alveolar adenocarcinoma; papillary adenocarcinoma; chromophobe carcinoma; acidophil carcinoma; oxyphilic adenocarcinoma; basophil carcinoma; clear cell adenocarcinoma; granular cell carcinoma; follicular adenocarcinoma; papillary and follicular adenocarcinoma; nonencapsulating sclerosing carcinoma; adrenal cortical carcinoma; endometroid carcinoma; skin appendage carcinoma; apocrine adenocarcinoma; sebaceous adenocarcinoma; ceruminous adenocarcinoma; mucoepidermoid carcinoma; cystadenocarcinoma; papillary cystadenocarcinoma; papillary serous cystadenocarcinoma; mucinous cystadenocarcinoma; mucinous adenocarcinoma; signet ring cell carcinoma; infiltrating duct carcinoma; medullary carcinoma; lobular carcinoma; inflammatory carcinoma; Paget's disease, mammary; acinar cell carcinoma; adenosquamous carcinoma; adenocarcinoma w/squamous metaplasia; thymoma, malignant; ovarian stromal tumor, malignant; thecoma, malignant; granulosa cell tumor, malignant; androblastoma, malignant; sertoli cell carcinoma; Leydig cell tumor, malignant; lipid cell tumor, malignant; paraganglioma, malignant; extra-mammary paraganglioma, malignant; pheochromocytoma; glomangiosarcoma; malignant melanoma; amelanotic melanoma; superficial spreading melanoma; malig melanoma in giant pigmented nevus; epithelioid cell melanoma; blue nevus, malignant; sarcoma; fibrosarcoma; fibrous histiocytoma, malignant; myxosarcoma; liposarcoma; leiomyosarcoma; rhabdomyosarcoma; embryonal rhabdomyosarcoma; alveolar rhabdomyosarcoma; stromal sarcoma; mixed tumor, malignant; mullerian mixed tumor; nephroblastoma; hepatoblastoma; carcinosarcoma; mesenchymoma, malignant; brenner tumor, malignant; phyllodes tumor, malignant; synovial sarcoma; mesothelioma, malignant; dysgerminoma; embryonal carcinoma; teratoma, malignant; struma ovarii, malignant; choriocarcinoma; mesonephroma, malignant; hemangiosarcoma; hemangioendothelioma, malignant; Kaposi sarcoma; hemangiopericytoma, malignant; lymphangiosarcoma; osteosarcoma; juxtacortical osteosarcoma; chondrosarcoma; chondroblastoma, malignant; mesenchymal chondrosarcoma; giant cell tumor of bone; Ewing sarcoma; odontogenic tumor, malignant; ameloblastic odontosarcoma; ameloblastoma, malignant; ameloblastic fibrosarcoma; pinealoma, malignant; chordoma; glioma, malignant; ependymoma; astrocytoma; protoplasmic astrocytoma; fibrillary astrocytoma; astroblastoma; glioblastoma; oligodendroglioma; oligodendroblastoma; primitive neuroectodermal; cerebellar sarcoma; ganglioneuroblastoma; neuroblastoma; retinoblastoma; olfactory neurogenic tumor; meningioma, malignant; neurofibrosarcoma; neurilemmoma, malignant; granular cell tumor, malignant; malignant lymphoma; Hodgkin's disease; Hodgkin's lymphoma; paragranuloma; malignant lymphoma, small lymphocytic; malignant lymphoma, large cell, diffuse; malignant lymphoma, follicular; mycosis fungoides; other specified non-Hodgkin's lymphomas; malignant histiocytosis; multiple myeloma; mast cell sarcoma; immunoproliferative small intestinal disease; leukemia; lymphoid leukemia; plasma cell leukemia; erythroleukemia; lymphosarcoma cell leukemia; myeloid leukemia; basophilic leukemia; eosinophilic leukemia; monocytic leukemia; mast cell leukemia; megakaryoblastic leukemia; myeloid sarcoma; and hairy cell leukemia.

[0784] In some embodiments, the cancer is a breast cancer. In some embodiments, the cancer is colon cancer. In some embodiments, the cancer is gastric cancer. In some embodiments, the cancer is RCC. In another embodiment, the cancer is non-small cell lung cancer (NSCLC).

[0785] In some embodiments, solid cancer indications that can be treated with cells described herein (e.g., cells modified using methods of the disclosure, e.g., genetically modified iNK cells), either alone or in combination with one or more additional cancer treatment modality, include: bladder cancer, hepatocellular carcinoma, prostate cancer, ovarian/uterine cancer, pancreatic cancer, mesothelioma, melanoma, glioblastoma, HPV-associated and/or HPV-positive cancers such as cervical and HPV+ head and neck cancer, oral cavity cancer, cancer of the pharynx, thyroid cancer, gallbladder cancer, and soft tissue sarcomas. In some embodiments, hematological cancer indications that can be treated with cells described herein (e.g., cells modified using methods of the disclosure, e.g., genetically modified iNK cells), either alone or in combination with one or more additional cancer treatment modalities, include: ALL, CLL, NHL, DLBCL, AML, CML, and multiple myeloma (MM).

[0786] In some embodiments, examples of cellular proliferative and/or differentiative disorders of the lung that can be treated with cells described herein (e.g., cells modified using methods of the disclosure) include, but are not limited to, tumors such as bronchogenic carcinoma, including paraneoplastic syndromes, bronchioloalveolar carcinoma, neuroendocrine tumors, such as bronchial carcinoid, miscellaneous tumors, metastatic tumors, and pleural tumors, including solitary fibrous tumors (pleural fibroma) and malignant mesothelioma.

[0787] In some embodiments, examples of cellular proliferative and/or differentiative disorders of the breast that can be treated with cells described herein (e.g., cells modified using methods of the disclosure) include, but are not limited to, proliferative breast disease including, e.g., epithelial hyperplasia, sclerosing adenosis, and small duct papillomas; tumors, e.g., stromal tumors such as fibroadenoma, phyllodes tumor, and sarcomas, and epithelial tumors such as large duct papilloma; carcinoma of the breast including in situ (noninvasive) carcinoma that includes ductal carcinoma in situ (including Paget's disease) and lobular carcinoma in situ, and invasive (infiltrating) carcinoma including, but not limited to, invasive ductal carcinoma, invasive lobular carcinoma, medullary carcinoma, colloid (mucinous) carcinoma, tubular carcinoma, and invasive papillary carcinoma, and miscellaneous malignant neoplasms. Disorders in the male breast include, but are not limited to, gynecomastia and carcinoma.

[0788] In some embodiments, examples of cellular proliferative and/or differentiative disorders involving the colon that can be treated with cells described herein (e.g., cells modified using methods of the disclosure) include, but are not limited to, tumors of the colon, such as non-neoplastic polyps, adenomas, familial syndromes, colorectal carcinogenesis, colorectal carcinoma, and carcinoid tumors.

[0789] In some embodiments, examples of cancers or neoplastic conditions, in addition to the ones described above that can be treated with cells described herein (e.g., cells modified using methods of the disclosure), include, but are not limited to, a fibrosarcoma, myosarcoma, liposarcoma, chondrosarcoma, osteogenic sarcoma, chordoma, angiosarcoma, endotheliosarcoma, lymphangiosarcoma, lymphangioendotheliosarcoma, synovioma, mesothelioma, Ewing's tumor, leiomyosarcoma, rhabdomyosarcoma, gastric cancer, esophageal cancer, rectal cancer, pancreatic cancer, ovarian cancer, prostate cancer, uterine cancer, cancer of the head and neck, skin cancer, brain cancer, squamous cell carcinoma, sebaceous gland carcinoma, papillary carcinoma, papillary adenocarcinoma, cystadenocarcinoma, medullary carcinoma, bronchogenic carcinoma, renal cell carcinoma, hepatoma, bile duct carcinoma, choriocarcinoma, seminoma, embryonal carcinoma, Wilm's tumor, cervical cancer, testicular cancer, small cell lung carcinoma, non-small cell lung carcinoma, bladder carcinoma, epithelial carcinoma, glioma, astrocytoma, medulloblastoma, craniopharyngioma, ependymoma, pinealoma, hemangioblastoma, acoustic neuroma, oligodendroglioma, meningioma, melanoma, neuroblastoma, retinoblastoma, leukemia, lymphoma, or Kaposi sarcoma.

[0790] In some embodiments, cells described herein (e.g., cells modified using methods of the disclosure) are used in combination with one or more cancer treatment modalities. In some embodiments, other cancer treatment modalities include, but are not limited to: chemotherapeutic agents include alkylating agents such as thiotepa and CYTOXAN® cyclosphosphamide; alkyl sulfonates such as busulfan, improsulfan and piposulfan; aziridines such as benzodopa, carboquone, meturedopa, and uredopa; ethylenimines and methylamelamines including altretamine, triethylenemelamine, trietylenephosphoramide, triethiylenethiophosphoramide and trimethylolomelamine; acetogenins (especially bullatacin and bullatacinone); delta-9-tetrahydrocannabinol (dronabinol, MARINOL®); beta-lapachone; lapachol; colchicines; betulinic acid; a camptothecin (including the synthetic analogue topotecan (HYCAMTIN®), CPT-11 (irinotecan, CAMPTOSAR®), acetylcamptothecin, scopolectin, and 9-aminocamptothecin); bryostatin; callystatin; CC-1065 (including its adozelesin, carzelesin and bizelesin synthetic analogues); podophyllotoxin; podophyllinic acid; teniposide; cryptophycins (particularly cryptophycin 1 and cryptophycin 8); dolastatin; duocarmycin (including the synthetic analogues, KW-2189 and CB1-TM1); eleutherobin; pancratistatin; a sarcodictyin; spongistatin; nitrogen mustards such as chlorambucil, chlornaphazine, cholophosphamide, estramustine, ifosfanide, mechlorethamine, mechlorethamine oxide hydrochloride, melphalan, novembichin, phenesterine, prednimustine, trofosfamide, uracil mustard; nitrosureas such as carmustine, chlorozotocin, fotemustine, lomustine, nimustine, and ranimnustine; antibiotics such as the enediyne antibiotics (e.g., calicheamicin, especially calicheamicin gammalI and calicheamicin omegal1 (see, e.g., Agnew, Chem. Intl. Ed. Engl., 1994; 33:183-186); dynemicin, including dynemicin A; an esperamicin; as well as neocarzinostatin chromophore and related chromoprotein enediyne antibiotic chromophores), aclacinomysins, actinomycin, authramycin, azaserine, bleomycins, cactinomycin, carabicin, caminomycin, carzinophilin, chromomycinis, dactinomycin, daunorubicin, detorubicin, 6-diazo-5-oxo-L-norleucine, doxorubicin (including ADRIAMYCIN®, morpholino-doxorubicin, cyanomorpholino-doxorubicin, 2-pyrrolino-doxorubicin, doxorubicin HCl liposome injection (DOXIL®) and deoxydoxorubicin), epirubicin, esorubicin, idarubicin, marcellomycin, mitomycins such as mitomycin C, mycophenolic acid, nogalamycin, olivomycins, peplomycin, potfiromycin, puromycin, quelamycin, rodorubicin, streptonigrin, streptozocin, tubercidin, ubenimex, zinostatin, zorubicin; anti-metabolites such as methotrexate, gemcitabine (GEMZAR®), tegafur (UFTORAL®), capecitabine (XELODA®), an epothilone, and 5-fluorouracil (5-FU); folic acid analogues such as denopterin, methotrexate, pteropterin, trimetrexate; purine analogs such as fludarabine, 6-mercaptopurine, thiamiprine, thioguanine; pyrimidine analogs such as ancitabine, azacitidine, 6-azauridine, carmofur, cytarabine, dideoxyuridine, doxifluridine, enocitabine, floxuridine; androgens such as calusterone, dromostanolone propionate, epitiostanol, mepitiostane, testolactone; anti-adrenals such as aminoglutethimide, mitotane, trilostane; folic acid replenisher such as frolinic acid; aceglatone; aldophosphamide glycoside; aminolevulinic acid; eniluracil; amsacrine; bestrabucil; bisantrene; edatraxate; defofamine; demecolcine; diaziquone; elformithine; elliptinium acetate; etoglucid; gallium nitrate; hydroxyurea; lentinan; lonidainine; maytansinoids such as maytansine and ansamitocins; mitoguazone; mitoxantrone; mopidanmol; nitraerine; pentostatin; phenamet; pirarubicin; losoxantrone; 2-ethylhydrazide; procarbazine; PSK® polysaccharide complex (JHS Natural Products, Eugene, Oreg.); razoxane; rhizoxin; sizofuran; spirogermanium; tenuazonic acid; triaziquone; 2,2′,2″-trichlorotriethylamine; trichothecenes (especially T-2 toxin, verracurin A, roridin A and anguidine); urethan; vindesine (ELDISINE®, FILDESIN®); dacarbazine; mannomustine; mitobronitol; mitolactol; pipobroman; gacytosine; arabinoside (“Ara-C”); thiotepa; taxoids, e.g., paclitaxel (TAXOL®), albumin-engineered nanoparticle formulation of paclitaxel (ABRAXANET™), and doxetaxel (TAXOTERE®); chloranbucil; 6-thioguanine; mercaptopurine; methotrexate; platinum analogs such as cisplatin and carboplatin; vinblastine (VELBAN®); platinum; etoposide (VP-16); ifosfamide; mitoxantrone; vincristine (ONCOVIN®); oxaliplatin; leucovovin; vinorelbine (NAVELBINE®); novantrone; edatrexate; daunomycin; aminopterin; cyclosporine, sirolimus, rapamycin, rapalogs, ibandronate; topoisomerase inhibitor RFS 2000; difluoromethylornithine (DMFO); retinoids such as retinoic acid; CHOP, an abbreviation for a combined therapy of cyclophosphamide, doxorubicin, vincristine, and prednisolone, and FOLFOX, an abbreviation for a treatment regimen with oxaliplatin (ELOXATIN™) combined with 5-FU, leucovovin; anti-estrogens and selective estrogen receptor modulators (SERMs), including, for example, tamoxifen (including NOLVADEX® tamoxifen), raloxifene (EVISTA®), droloxifene, 4-hydroxytamoxifen, trioxifene, keoxifene, LY117018, onapristone, and toremifene (FARESTON®); anti-progesterones; estrogen receptor down-regulators (ERDs); estrogen receptor antagonists such as fulvestrant (FASLODEX®); agents that function to suppress or shut down the ovaries, for example, leutinizing hormone-releasing hormone (LHRH) agonists such as leuprolide acetate (LUPRON® and ELIGARD®), goserelin acetate, buserelin acetate and tripterelin; other anti-androgens such as flutamide, nilutamide and bicalutamide; and aromatase inhibitors that inhibit the enzyme aromatase, which regulates estrogen production in the adrenal glands, such as, for example, 4(5)-imidazoles, aminoglutethimide, megestrol acetate (MEGASE®), exemestane (AROMASIN®), formestanie, fadrozole, vorozole (RIVISOR®), letrozole (FEMARA®), and anastrozole (ARIMIDEX®); bisphosphonates such as clodronate (for example, BONEFOS® or OSTAC®), etidronate (DIDROCAL®), NE-58095, zoledronic acid/zoledronate (ZOMETA®), alendronate (FOSAMAX®), pamidronate (AREDIA®), tiludronate (SKELID®), or risedronate (ACTONEL®); troxacitabine (a 1,3-dioxolane nucleoside cytosine analog); aptamers, described for example in U.S. Pat. No. 6,344,321, which is herein incorporated by reference in its entirety; anti HGF monoclonal antibodies (e.g., AV299 from Aveo, AMG102, from Amgen); truncated mTOR variants (e.g., CGEN241 from Compugen); protein kinase inhibitors that block mTOR induced pathways (e.g., ARQ197 from Arqule, XL880 from Exelexis, SGX523 from SGX Pharmaceuticals, MP470 from Supergen, PF2341066 from Pfizer); vaccines such as THERATOPE® vaccine and gene therapy vaccines, for example, ALLOVECTIN® vaccine, LEUVECTIN® vaccine, and VAXID® vaccine; topoisomerase 1 inhibitor (e.g., LURTOTECAN®); rmRH (e.g., ABARELIX®); lapatinib ditosylate (an ErbB-2 and EGFR dual tyrosine kinase small-molecule inhibitor also known as GW572016); COX-2 inhibitors such as celecoxib (CELEBREX®; 4-(5-(4-methylphenyl)-3-(trifluoromethyl)-1H-pyrazol-1-yl) benzenesulfonamide; and pharmaceutically acceptable salts, acids or derivatives of any of the above.

[0791] In some embodiments, cells described herein (e.g., cells modified using methods of the disclosure) are used in combination with one or more cancer treatment modalities that facilitate the induction of antibody dependent cellular cytotoxicity (ADCC) (see e.g., Janeway's Immunobiology by K. Murphy and C. weaver). In some embodiments, such a cancer treatment modality is an antibody. In some embodiments, such an antibody is Trastuzumab. In some embodiments, such an antibody is Rituximab. In some embodiments, such an antibody is Rituximab, Palivizumab, Infliximab, Trastuzumab, Alemtuzumab, Adalimumab, Ibritumomab tiuxetan, Omalizumab, Cetuximab, Bevacizumab, Natalizumab, Panitumumab, Ranibizumab, Certolizumab pegol, Ustekinumab, Canakinumab, Golimumab, Ofatumumab, Tocilizumab, Denosumab, Belimumab, Ipilimumab, Brentuximab vedotin, Pertuzumab, Trastuzumab emtansine, Obinutuzumab, Siltuximab, Ramucirumab, Vedolizumab, Blinatumomab, Nivolumab, Pembrolizumab, Idarucizumab, Necitumumab, Dinutuximab, Secukinumab, Mepolizumab, Alirocumab, Evolocumab, Daratumumab, Elotuzumab, Ixekizumab, Reslizumab, Olaratumab, Bezlotoxumab, Atezolizumab, Obiltoxaximab, Inotuzumab ozogamicin, Brodalumab, Guselkumab, Dupilumab, Sarilumab, Avelumab, Ocrelizumab, Emicizumab, Benralizumab, Gemtuzumab ozogamicin, Durvalumab, Burosumab, Lanadelumab, Mogamulizumab, Erenumab, Galcanezumab, Tildrakizumab, Cemiplimab, Emapalumab, Fremanezumab, Ibalizumab, Moxetumomab pasudodox, Ravulizumab, Romosozumab, Risankizumab, Polatuzumab vedotin, Brolucizumab, or any combination thereof (see e.g., Lu et al., Development of therapeutic antibodies for the treatment of diseases. Journal of Biomedical Science, 2020). In some embodiments, cells described herein (e.g., cells modified using methods of the disclosure) are used in combination with one or more cancer treatment modalities that facilitate the induction of antibody dependent cellular cytotoxicity (ADCC), wherein the cancer treatment modality is an antibody or appropriate fragment thereof targeting CD20, TNFα, HER2, CD52, IgE, EGFR, VEGF-A, ITGA4, CTLA-4, CD30, VEGFR2, α4β7 integrin, CD19, CD3, PD-1, GD2, CD38, SLAMF7, PDGFRα, PD-L1, CD22, CD33, IFNγ, CD79β, or any combination thereof.

[0792] In some embodiments, cells described herein are utilized in combination with checkpoint inhibitors. Examples of suitable combination therapy checkpoint inhibitors include, but are not limited to, antagonists of PD-1 (Pdcdl, CD279), PDL-1 (CD274), TIM-3 (Havcr2), TIGIT (WUCAM and Vstm3), LAG-3 (Lag3, CD223), CTLA-4 (Ctla4, CD152), 2B4 (CD244), 4-1BB (CD137), 4-1BBL (CD137L), A2aR, BATE, BTLA, CD39 (Entpdl), CD47, CD73 (NT5E), CD94, CD96, CD160, CD200, CD200R, CD274, CEACAM1, CSF-1R, Foxpl, GARP, HVEM, IDO, EDO, TDO, LAIR-1, MICA/B, NR4A2, MAFB, OCT-2 (Pou2f2), retinoic acid receptor alpha (Rara), TLR3, VISTA, NKG2A/HLA-E, inhibitory KIR (for example, 2DL1, 2DL2, 2DL3, 3DL1, and 3DL2), or any suitable combination thereof.

[0793] In some embodiments, the antagonist inhibiting any of the above checkpoint molecules is an antibody. In some embodiments, the checkpoint inhibitory antibodies may be murine antibodies, human antibodies, humanized antibodies, a camel Ig, a shark heavychain-only antibody (VNAR), Ig NAR, chimeric antibodies, recombinant antibodies, or antibody fragments thereof. Non-limiting examples of antibody fragments include Fab, Fab′, F(ab)′2, F(ab)′3, Fv, single chain antigen binding fragments (scFv), (scFv)2, disulfide stabilized Fv (dsFv), minibody, diabody, triabody, tetrabody, single-domain antigen binding fragments (sdAb, Nanobody), recombinant heavy-chain-only antibody (VHH), and other antibody fragments that maintain the binding specificity of the whole antibody, which may be more cost-effective to produce, more easily used, or more sensitive than the whole antibody. In some embodiments, the one, or two, or three, or more checkpoint inhibitors comprise at least one of atezolizumab (anti-PDL1 mAb), avelumab (anti-PDL1 mAb), durvalumab (anti-PDL1 mAb), tremelimumab (anti-CTLA4 mAb), ipilimumab (anti-CTLA4 mAb), IPH4102 (anti-KIR), IPH43 (anti-MICA), IPH33 (anti-TLR3), lirilumab (anti-KIR), monalizumab (anti-NKG2A), nivolumab (anti-PD1 mAb), pembrolizumab (anti-PD 1 mAb), and any derivatives, functional equivalents, or biosimilars thereof.

[0794] In some embodiments, the antagonist inhibiting any of the above checkpoint molecules is microRNA-based, as many miRNAs are found as regulators that control the expression of immune checkpoints (Dragomir et al, Cancer Biol Med. 2018, 15(2): 103-115). In some embodiments, the checkpoint antagonistic miRNAs include, but are not limited to, miR-28, miR-15/16, miR-138, miR-342, miR-20b, miR-21, miR-130b, miR-34a, miR-197, miR-200c, miR-200, miR-17-5p, miR-570, miR-424, miR-155, miR-574-3p, miR-513, miR-29c, and/or any suitable combination thereof.

[0795] In some embodiments, cells described herein (e.g., cells modified using methods of the disclosure) are used in combination with one or more cancer treatment modalities such as exogenous interleukin (IL) dosing. In some embodiments, an exogenous IL provided to a patient is IL-15. In some embodiments, systemic IL-15 dosing when used in combination with cells described herein is reduced when compared to standard dosing concentrations (see e.g., Waldmann et al., IL-15 in the Combination Immunotherapy of Cancer. Front. Immunology, 2020).

[0796] Other compounds that are effective in treating cancer are known in the art and described herein that are suitable for use with the compositions and methods of the present disclosure as additional cancer treatment modalities are described, for example, in the “Physicians' Desk Reference, 62nd edition. Oradell, N.J.: Medical Economics Co., 2008”, Goodman & Gilman's “The Pharmacological Basis of Therapeutics, Eleventh Edition. McGraw-Hill, 2005”, “Remington: The Science and Practice of Pharmacy, 20th Edition. Baltimore, Md.: Lippincott Williams & Wilkins, 2000,” and “The Merck Index, Fourteenth Edition. Whitehouse Station, N.J.: Merck Research Laboratories, 2006”, incorporated herein by reference in relevant parts.

[0797] All publications, patents and patent applications cited herein, whether supra or infra, are hereby incorporated by reference in their entirety.

[0798] Throughout this specification, unless the context requires otherwise, the words “comprise”, “comprises” and “comprising” will be understood to imply the inclusion of a stated step or element or group of steps or elements but not the exclusion of any other step or element or group of steps or elements. By “consisting of is meant including, and limited to, whatever follows the phrase “consisting of:” Thus, the phrase “consisting of” indicates that the listed elements are required or mandatory, and that no other elements may be present. By “consisting essentially of” is meant including any elements listed after the phrase, and limited to other elements that do not interfere with or contribute to the activity or action specified in the disclosure for the listed elements. Thus, the phrase “consisting essentially” of indicates that the listed elements are required or mandatory, but that no other elements are optional and may or may not be present depending upon whether or not they affect the activity or action of the listed elements.

[0799] These and other changes can be made to the embodiments in light of the above-detailed description. In general, in the following claims, the terms used should not be construed to limit the claims to the specific embodiments disclosed in the specification and the claims, but should be construed to include all possible embodiments along with the full scope of equivalents to which such claims are entitled. Accordingly, the claims are not limited by the disclosure.

[0800] The various embodiments described above can be combined to provide further embodiments. All of the U.S. patents, U.S. patent application publications, U.S. patent applications, foreign patents, foreign patent applications and non-patent publications referred to in this specification and/or listed in the Application Data Sheet are incorporated herein by reference, in their entirety. The contents of database entries, e.g., NCBI nucleotide or protein database entries provided herein, are incorporated herein in their entirety. Where database entries are subject to change over time, the contents as of the filing date of the present application are incorporated herein by reference. Aspects of the embodiments can be modified, if necessary to employ concepts of the various patents, applications and publications to provide yet further embodiments.

[0801] The disclosure is further illustrated by the following examples. The examples are provided for illustrative purposes only. They are not to be construed as limiting the scope or content of the disclosure in any way.

### EXAMPLES

### Example 1: Screening of Guide RNAs for GAPDH

[0802] This example describes the screening of AsCpf1 (AsCas12a) guide RNAs that target the housekeeping gene GAPDH. GAPDH encodes Glyceraldehyde-3-Phosphate Dehydrogenase, an essential protein that catalyzes oxidative phosphorylation of glyceraldehyde-3-phosphate in the presence of inorganic phosphate and nicotinamide adenine dinucleotide (NAD), an important energy-yielding step in carbohydrate metabolism. The guide RNAs used in this analysis were all 41-mer RNA molecules with the following design: 5′-UAAUUUCUACUCUUGUAGAU-[21-mer targeting domain sequence]-3′ (SEQ ID NO: 90). For example, the guide RNA denoted RSQ22337 had the following sequence: 5′-UAAUUUCUACUCUUGUAGAUAUCUUCUAGGUAUGACAACGA-3′ (SEQ ID NO: 93) where the 21-mer targeting domain sequence is underlined. The guide RNAs with the targeting domain sequences shown in Table 7 were tested to determine how effective they were at editing GAPDH. Cas12a RNPs (RNPs having an engineered Cas12a (SEQ ID NO: 62)), containing each of these guide RNAs were transfected into iPSCs, and then editing levels were assayed three days after transfection (see e.g., Wong, K. G. et al. CryoPause: A New Method to Immediately Initiate Experiments after Cryopreservation of Pluripotent Stem Cells. Stem Cell Reports 9, 355-365 (2017)). The results are shown in FIG. 1 and FIG. 2. RSQ24570, RSQ24582, RSQ24589, RSQ24585, and RSQ22337 exhibited the greatest levels of measurable editing out of the GAPDH guides tested, editing approximately 70% or more of cells (about 92%, 89%, 88%, 87%, and 70%, respectively). It was observed that cells transfected with gRNAs targeting certain exonic regions yielded much lower amounts of isolatable genomic DNA (gDNA) for analyzing editing efficiency (at day 3 after transfection) when compared to cells transfected with gRNAs targeting intronic regions, indicating that that RNPs with certain exon-targeting gRNAs were cytotoxic to the cells. This suggested that cells edited with gRNAs targeting exonic regions could result in significant cell death due to the introduction of indels within GAPDH leading to expression of a non-functional GAPDH protein or a protein with insufficient function. It was postulated that it might be possible to use a rescue plasmid to repair the gRNA-mediated cleavage site in GAPDH while also knocking in a gene cargo of interest in frame with the repaired GAPDH via HDR, thereby rescuing those cells in which GAPDH is repaired and the cargo of interest is successfully integrated (as shown in FIG. 1 and FIG. 2). Those transfected cells that are edited (the majority of transfected cells, if a highly effective RNA-guided nucleases is used) but do not undergo HDR repair of GAPDH and do not integrate the cargo of interest die over time because they do not have a functioning GAPDH gene. Those cells carrying the cargo of interest would have an advantage due to a fully functioning GAPDH gene as the cells grow and divide, and these cells would be selected for over time. The expected end result would be a population of cells with a very high rate of cargo knock-in within the GAPDH locus.

[0803] The data in FIG. 2 suggested that while Cas12a RNP comprising RSQ22337 resulted in an editing level of approximately 70% at 3 days post-transfection, it caused slightly higher levels of toxicity than other exonic guides (RSQ24570, RSQ24582, RSQ24589, and RSQ24585) (see FIG. 2, only about 3.9 ng/μL of gDNA was isolated from edited cells). Thus, the actual editing efficiency was very likely significantly higher than 70%, as many cells had already died by 3 days post-transfection due to the lack of available rescue constructs and NHEJ forming toxic indels. As a result, RSQ22337 was chosen for further testing.

TABLE 7
Guide RNA sequences

| SEQ ID | | gRNA targeting | |
|---|---|---|---|
| NO: | Name | domain sequence (RNA) | Location |
| 94 | RSQ22336 | UGAGCCAGCCACCAGAGGGCG | Intron 8 |
| 95 | RSQ22337 | AUCUUCUAGGUAUGACAACGA | Intron 8/Exon 9 (cut site |
| | | | in exon 9) |
| 96 | RSQ22338 | GCUACAGCAACAGGGUGGUGG | Exon 9 |
| 97 | RSQ24559 | CCAUAAUUUCCUUUCAAGGUG | Intron 7 |
| 98 | RSQ24560 | CUUUCAAGGUGGGGAGGGAGG | Intron 7 |
| 99 | RSQ24561 | AAGGUGGGGAGGGAGGUAGAG | Intron 7 |
| 100 | RSQ24562 | GCAGACCACAGUCCAUGCCAU | Exon 8 |
| 101 | RSQ24563 | CAGACCACAGUCCAUGCCAUC | Exon 8 |
| 102 | RSQ24564 | CCGGAGGGGCCAUCCACAGUC | Exon 8 |
| 103 | RSQ24565 | UAGACGGCAGGUCAGGUCCAC | Exon 8 |
| 104 | RSQ24566 | CUAGACGGCAGGUCAGGUCCA | Exon 8 |
| 105 | RSQ24567 | UCUAGACGGCAGGUCAGGUCC | Exon 8 |
| 106 | RSQ24568 | GCAGGUUUUUCUAGACGGCAG | Exon 8 |
| 107 | RSQ24569 | UCAAGCUCAUUUCCUGGUAUG | Exon 8 |
| 108 | RSQ24570 | CUGGUAUGUGGCUGGGGCCAG | Exon 8/Intron 8 (cut site |
| | | | in intron 8) |
| 109 | RSQ24571 | AGAGCCAGUCUCUGGCCCCAG | Intron 8 |
| 110 | RSQ24572 | AAGAGCCAGUCUCUGGCCCCA | Intron 8 |
| 111 | RSQ24573 | UAAGAGCCAGUCUCUGGCCCC | Intron 8 |
| 112 | RSQ24574 | CUGAGCCAGCCACCAGAGGGC | Intron 8 |
| 113 | RSQ24575 | UCUGAGCCAGCCACCAGAGGG | Intron 8 |
| 114 | RSQ24576 | CAUCUUCUAGGUAUGACAACG | Exon 9 |
| 115 | RSQ24578 | UUGAUGGUACAUGACAAGGUG | 1 kb_downstream |
| 116 | RSQ24579 | GAGGCCCUACCCUCAGUCUGA | 1 kb_downstream |
| 117 | RSQ24580 | CCUCUCCUCGCUCCAGUCCUA | 1 kb_downstream |
| 118 | RSQ24581 | CUCUCCUCGCUCCAGUCCUAG | 1 kb_downstream |
| 119 | RSQ24582 | GCCAACAGCAGAUAGCCUAGG | 1 kb_downstream |
| 120 | RSQ24583 | UGUGCCCUCGUGUCUUAUCUG | 1 kb_downstream |
| 121 | RSQ24584 | CCUAGAUGAAUCCUGCUUGAA | 1 kb_downstream |
| 122 | RSQ24585 | GGUACUUGGUUUACCUAGAUG | 1 kb_downstream |
| 123 | RSQ24586 | AGGUACUUGGUUUACCUAGAU | 1 kb_downstream |
| 124 | RSQ24587 | AAACAUUAUAUAGUCCUUACC | 1 kb_downstream |
| 125 | RSQ24588 | UAAACAUUAUAUAGUCCUUAC | 1 kb_downstream |
| 126 | RSQ24589 | GCGAUUUUUAAACAUUAUAUA | 1 kb_downstream |
| 127 | RSQ24590 | ACCGAUUUUUAAACAUUAUAU | 1 kb_downstream |
| 128 | RSQ24591 | UACCGAUUUUUAAACAUUAUA | 1 kb_downstream |
| 129 | RSQ24592 | AAAAUCGGUAAAAAUGCCCAC | 1 kb_downstream |
| 130 | RSQ24593 | GAGGAAGAUGAACUGAGAUGU | 1 kb_downstream |
| 131 | RSQ24594 | AGGAAGAUGAACUGAGAUGUG | 1 kb_downstream |

### Example 2: Rescue of GAPDH Knock-Out Through Targeted Integration

[0804] To test the feasibility of the exemplary selection system illustrated in FIGS. 3A, 3B, and 3C, the essential gene GAPDH was targeted in iPSCs using an RNP comprising AsCpf1 (SEQ ID NO: 62), and a guide RNA (RSQ22337) (SEQ ID NO: 95), resulting in a double-strand break towards the 5′ end of the last exon of GAPDH (exon 9). While iPSCs were tested for the purposes of this experiment, the described methods could be applied to other cell types. RSQ22337 was determined to be highly specific to GAPDH and have minimal off-target sites in the genome (data not shown). GAPDH was thus considered a good exemplary candidate target gene for the cargo integration and selection methods described herein, at least in part because there was at least one highly specific gRNA targeting a terminal exon capable of mediating highly efficient RNA-guided cleavage.

[0805] The CRISPR/Cas nuclease and guide RNA were introduced into cells by nucleofection (electroporation) of a ribonucleoprotein (RNP) according to known methods. The cells were also contacted with a double stranded DNA donor template (e.g., a dsDNA plasmid) that included a knock-in cassette comprising in 5′-to-3′ order, a 5′ homology arm approximately 500 bp in length (comprising a portion of exon 8, intron 8, and a 5′ codon-optimized coding portion of exon 9 optimized to prevent further binding of the gRNA targeting domain sequence of the guide RNA (RSQ22337)), an in-frame sequence encoding the P2A self-cleaving peptide (“P2A”), an in-frame coding sequence for CD47 (“Cargo”), a stop codon and polyA signal sequence, and a 3′ homology arm approximately 500 bp in length (comprising a coding portion of exon 9 including a stop codon, the 3′ exonic region of exon 9, and a portion of the downstream intergenic sequence) (as shown in FIG. 3B). The 5′ and 3′ homology arms flanking the knock-in cassette were designed to correspond to sequences surrounding the RNP cleavage site.

[0806] As shown schematically in FIG. 3C, NHEJ-mediated creation of indels in cells that are edited by the DNA nuclease but not successfully targeted by the DNA donor template, produce a non-functional version of GAPDH which is lethal to the cells. This knock-out is “rescued” in cells that are successfully targeted by the DNA donor template by correct integration of the knock-in cassette, which restores the GAPDH coding region so that a functioning gene product is produced, and positions the P2A-Cargo sequence in frame with and downstream (3′) of the GAPDH coding sequence. These cells survive and continue to proliferate. Cells that are not edited by the DNA nuclease also continue to proliferate but are expected to represent a very small percentage of the overall cell population, if, as in this case, the editing efficiency of the nuclease in combination with the gRNA is high (see Example 1) and results in creation of a non-functional protein. The editing results for RSQ22337 likely underestimate the actual editing efficiency of the guide due to cell death within the population of edited cells.

[0807] The editing efficiency of RNPs containing RSQ22337 were tested at different concentrations (4 μM, 1 μM, 0.25 μM, or 0.0625 μM of RNP) in the absence of double stranded DNA donor template) was first measured at 48 after nucleofection of iPSCs (a time point prior to cell death due to loss of GAPDH gene function). The results show that a concentration of 4 μM resulted in the highest editing levels.

[0808] FIGS. 5 and 6 show that a protein-encoding cargo gene can be knocked into a housekeeping gene, such as GAPDH, at high efficiency using the selection systems described herein. FIG. 5 shows the knock-in (KI) efficiency of the CD47-encoding “cargo” in GAPDH at 4 days post-electroporation when RNP was present at a concentration of 4 μM and the dsDNA plasmid (“PLA”) encoding CD47 was also present. Knock-in efficiency was measured with two different concentrations of the plasmid (0.5 μg and 2.5 μg of plasmid) and found to be dose responsive. Knock-in was measured using ddPCR targeting the 3′ position of the knock-in “cargo”. Control cells electroporated with RNP alone or PLA alone exhibited much lower knock-in rates than electroporation of RNP and PLA (at a concentration of 2.5 μg).

[0809] FIG. 6 shows the knock-in efficiency of the CD47-encoding “cargo” in GAPDH at 9 days post-electroporation of the cells with the RNP and dsDNA plasmid encoding CD47. The percentage knock-in was similar when either the 5′ end or the 3′ end of the cargo was assayed by ddPCR, using a primer specific for the 5′ of the gRNA target site or 3′ of the site in the poly A region, increasing the reliability of the result. The knock-in efficiency of the cargo was significantly higher at 9 days compared to at 4 days post-transfection (compare FIGS. 5 and 6), consistent with the expectation that there would be substantial cell death in RNP-induced GAPDH knock-out cells that lacked a functional GAPDH gene as a result of unsuccessful cargo knock-in and rescue at GAPDH.

[0810] An experiment was then conducted to test the mechanism of the selection system described above by confirming that edited cells containing a successfully knocked-in cargo gene would be more efficiently selected for using a gRNA targeting a protein-coding exonic portion of GAPDH rather than a gRNA targeting an intron. FIG. 13 compares the knock-in efficiency of a GFP-encoding “cargo” knock-in cassette at the GAPDH locus when using a gRNA that mediates cleavage within an intron (RSQ24570 (SEQ ID NO: 108) binds to the exon 8-intron 9 junction, leading to Cas12a-mediated cleavage within intron 8) relative to a gRNA specific for an exon (RSQ22337 (SEQ ID NO: 95), targeting the intron 8-exon 9 junction, leading to Cas12a-mediated cleavage within exon 9). Rescue dsDNA plasmid PLA1593 comprising the reporter “cargo” GFP was nucleofected into iPSCs with an RNP (Cas12a and RSQ22337) targeting GAPDH as described above, while dsDNA plasmid PLA1651 comprising a donor template sequence as depicted in SEQ ID NO: 46 was nucleofected with an RNP comprising Cas12a and RSQ24570. The homology arms of each plasmid were designed to mediate HDR based on the target site of each gRNA. Knock-in was visualized using microscopy (FIG. 13A) and was measured using flow cytometry (FIG. 13B). Knock-in efficiency was significantly higher when using a gRNA and associated knock-in cassette that cleaves at an exonic coding region (exon 9) when compared to an intronic region (intron 8). FIG. 13B shows that 95.6% of cells electroporated with RSQ22337 and the GFP-encoding “cargo” knock-in cassette (e.g., PLA1593; comprising donor template SEQ ID NO: 44) expressed GFP compared to only 2.1% of cells electroporated with RSQ24570 and a GFP-encoding “cargo” knock-in cassette (PLA1651; comprising donor template SEQ ID NO: 46). The results depicted in FIG. 13 are striking, as while the measured editing efficiency (as determined by indel generation frequency 72 hours post-transfection as discussed above in Example 1, see FIG. 2) of RSQ24570 is higher than that of RSQ22337, the proportion of cells rescued by the knock-in construct targeting the coding exonic region are significantly higher.

[0811] In an additional set of experiments, iPS cells were contacted with an RNP containing AsCas12a (SEQ ID NO: 62), and RSQ22337 (SEQ ID NO: 95) or RSQ24570 (SEQ ID NO: 108), along with either the PLA1593 (comprising donor template SEQ ID NO: 44) or the PLA1651 (comprising donor template SEQ ID NO: 46) double stranded DNA donor template plasmid, respectively, as described above. Flow cytometry was performed 7 days following nucleofection to detect GFP expression and help determine to what extent each plasmid mediated donor template and knock-in cassette was integrated successfully at its respective GAPDH target site. The GAPDH results in FIG. 17A show that cells nucleofected with the RNP containing RSQ22337 exhibited a much higher amount of GFP expression relative to cells nucleofected with RSQ24750, showing that most cells express GFP at day 7 following electroporation. This suggests that the GFP-encoding knock-in cassette integrated successfully at high levels within the RSQ22337-transfected cells. Cells nucleofected with RNPs containing RSQ24750 displayed much lower GFP expression, indicating that the knock-in cassette did not integrate successfully in most of these cells (FIG. 17A). The GAPDH results of FIG. 17B show that use of RSQ22337 resulted in about 80% editing as measured using genomic DNA 48 hours following RNP transfection, while RSQ24570 resulted in about 75% editing as measured using genomic DNA 48 hours following RNP transfection. The high editing of RSQ22337 correlated well with the high GFP expression level depicted in FIG. 17A; however, the high editing of RSQ24750 correlated poorly with the low GFP expression level depicted in FIG. 17A. FIG. 17C shows the relative integrated “cargo” (GFP) expression intensity of the edited cells. Finally, a ddPCR assay was conducted to determine the percentage of knock-in integration events in GAPDH alleles in the cells nucleofected with RNPs containing RSQ22337 and the PLA1593 donor plasmid. FIG. 19 shows by ddPCR that over 60% of alleles had a GFP-encoding cassette knocked-in successfully.

### Example 3: Rescue of GAPDH Knock-Out Through Targeted Integration of Multiple Cargos

[0812] In some cases, it is desirable to use the selection and cargo knock in strategies disclosed herein to efficiently produce and isolate an edited cell containing two or more different exogenous coding sequences, e.g., two or more different exogenous genes, integrated into a single essential gene locus, such as, e.g., the GAPDH locus. FIG. 14 shows two strategies for introducing two or more different exogenous coding regions into an essential gene locus. FIG. 14A shows a first exemplary strategy wherein a multi-cistronic knock-in cassette, e.g., a bi-cistronic knock-in cassette containing two or more coding regions (GFP and mCherry in FIG. 14A), separated by linkers (e.g., T2A, P2A, and/or IRES, see SEQ ID NO: 29-32 and 33-37), is inserted into one or both of the alleles of the essential gene, e.g., GAPDH. FIG. 14B shows a second exemplary strategy (a bi-allelic insertion strategy) wherein two knock-in cassettes comprising different cargo sequences (e.g., different exogenous genes, such as GFP and mCherry in FIG. 14B) are inserted into separate alleles of the essential gene locus, e.g., GAPDH.

[0813] Experiments were conducted to test the integration strategy depicted in FIG. 14A, and to determine whether the use of different combinations of linkers in the knock-in cassette could affect the expression of the cargo sequences. An RNP containing Cas12a and RSQ22337 (targeting the GAPDH locus, as described in Examples 1 and 2) was nucleofected into iPSCs with one of six different plasmids (PLA) containing a bi-cistronic knock-in cassette comprising “cargo” sequences encoding GFP and mCherry (PLA1573, PLA1574, PLA1575, PLA1582, PLA1583, and PLA1584, as depicted in FIG. 15A; comprising donor templates SEQ ID NOs: 38-43). GFP was the first cargo and mCherry was the second cargo in each of these constructs. Each of the tested plasmids contained a different combination of linkers between the coding sequences (Linkers 1 and 2, as depicted in FIG. 15A). PLA1573 (comprising donor template SEQ ID NO: 38) contained T2A and T2A as linkers 1 and 2, respectively; PLA1574 (comprising donor template SEQ ID NO: 39) contained P2A and IRES as linkers 1 and 2, respectively; PLA1575 (comprising donor template SEQ ID NO: 40) contained P2A and P2A as linkers 1 and 2, respectively; PLA1582 (comprising donor template SEQ ID NO: 41) contained P2A and T2A as linkers 1 and 2, respectively; PLA1583 (comprising donor template SEQ ID NO: 42) contained T2A and P2A as linkers 1 and 2, respectively; and PLA1584 (comprising donor template SEQ ID NO: 43) contained T2A and IRES as linkers 1 and 2, respectively. FIG. 15B and FIG. 15C shows the results of various knock-in cassette integration events at the GAPDH locus. FIG. 15B depicts exemplary microscopy images (brightfield and fluorescent microscopy at 2× on a Keyence microscope) of edited iPSCs nine days following nucleofection with exemplary plasmids PLA1582, PLA1583, and PLA1584, each of which exhibited detectable GFP and mCherry expression.

[0814] FIG. 15C quantifies the fluorescence levels of GFP and mCherry in the iPSCs nucleofected with the various plasmids described in FIG. 15A containing the bi-cistronic knock-in cassettes with the different described linker pairs (PLA1575, PLA1582, PLA1574, PLA1583, PLA1573, and PLA1584). In each of these bi-cistronic constructs, GFP was always the first cargo and mCherry was always the second cargo. A plasmid containing a knock-in cassette with mCherry as a sole “cargo” (as depicted in FIG. 15C) was also tested as a control. The data show that the expression levels of GFP, as the first cargo, were similar between bicistronic constructs and consistently higher than the expression levels of mCherry, the second cargo. Cells containing the control knock-in cassette containing mCherry as the sole cargo exhibited the highest mCherry expression, suggesting that it is possible to vary (e.g., reduce) expression of a cargo by placing it as the second cargo in a bicistronic cassette. In addition, FIG. 15C shows that placement of an IRES linker immediately prior to the second cargo coding sequence resulted in lower expression of the second cargo when compared to the placement of a P2A or T2A linker prior to the second cargo coding sequence. Thus, the results show that it is possible to differentially modulate (i.e., increase or decrease) the expression of two cargo coding sequences from a multicistronic knock-in cassette by varying the order of the cargos in the cassette (placing a cargo as the first cargo for higher expression, or as the second cargo for lower expression) and by placing particular linkers (P2A or T2A for higher expression; IRES for lower expression) upstream of each of the cargos.

[0815] An experiment was conducted to test the bi-allelic integration strategy depicted in FIG. 14B. An RNP containing Cas12a and RSQ22337 (targeting the GAPDH locus, as described in Examples 1 and 2) was nucleofected into iPSCs with two different plasmids. One plasmid contained a knock-in cassette containing a GFP coding sequence as the cargo, and the second plasmid contained a knock-in cassette containing an mCherry coding sequence as the cargo (as depicted in FIG. 14B). FIG. 16A shows exemplary flow cytometry data for the nucleofected iPSCs. Gating showed that a high percentage, approximately 15%, of the nucleofected cells expressed GFP and mCherry, suggesting that the GFP knock-in cassette and the mCherry knock-in cassette were each integrated into an allele of GAPDH. Approximately 41% of the nucleofected cells expressed mCherry and approximately 36% of the nucleofected cells expressed GFP.

[0816] An additional experiment was conducted to test biallelic insertion of GFP and mCherry in populations of iPSCs. The iPSC populations were transformed as described. The cells were nucleofected with 0.5 μM RNPs comprising Cas12a and RSQ22337 (targeting the GAPDH locus, as described in Examples 1 and 2), and 2.5 μg of donor template (5 trials) or 5 μg of donor template (1 trial), and then sorted 3 or 9 days following nucleofection. An exemplary image of the edited cell populations that were analyzed by flow cytometry analysis is depicted in FIG. 16B. FIG. 16C provides the flow cytometry analysis results from these trials. The larger bar at each time point (day 3 or day 9) in FIG. 16C represents the total percentage of the cells in each population that positively express at least one cargo, e.g., at least one allele of GFP and/or at least one allele of mCherry cargo. The smaller bar at each time point shows the percentage of cells in each population that express both GFP and mCherry and therefore represents cells with GFP/mCherry biallelic integration. These results showed that approximately 8-15% percent of the transformed cells in each population displayed a biallelic GFP/mCherry insertion phenotype at nine days following transformation.

### Example 4: Rescue of B2M Knock-Out Through Targeted Integration

[0817] The approach described in Example 2 is used to target the B2M gene in NK cells (e.g., by targeting NK cells such as iPS-derived NK cells directly or iPS cells that are then differentiated into NK cells). NK cells that lack a functional B2M gene will not be able to recognize MHC Class I on the surface of one another and will attack each other, depleting the population in a phenomenon known as fratricide. By knocking-out the B2M gene and knocking-in a “cargo” sequence that also restores a functional B2M gene one automatically enriches for the knock-in cell type.

### Example 5: Assessment of RPLP0 as a Candidate Essential Gene for Knock-Out Through Targeted Integration

[0818] The knock-in integration and selection approach described in Example 2 was evaluated for potential use in targeting other essential genes in cells, e.g., ribosomal genes such as the RPLP0 gene. The RPLP0 gene encodes a ribosomal protein that is a component of the 60S subunit. Ribosomal protein PO is the functional equivalent of E. coli protein L10 and is generally used as a housekeeping gene in RT-qPCR assays.

[0819] Exemplary AsCpf1 (AsCas12a) guide RNAs that target terminal exons of the RPLP0 gene are shown in Table 8 below. The guide RNAs are all 41-mer RNA molecules with the following design: 5′-UAAUUUCUACUCUUGUAGAU-[21-mer targeting domain sequence]-3′ (SEQ ID NO: 90). FIG. 7 and FIG. 8 map these guides to terminal exons of the RPLP0 gene.

TABLE 8
Guide RNA sequences

| SEQ | | gRNA |
|---|---|---|
| ID NO: | Name | targeting domain sequence (RNA) |
| 132 | RPLP0-1 | UGGCUGCUGCCCCUGUGGCUG |
| 133 | RPLP0-2 | GUCUCUUUGACUAAUCACCAA |
| 134 | RPLP0-3 | ACUAAUCACCAAAAAGCAACC |
| 135 | RPLP0-4 | GUGAUUAGUCAAAGAGACCAA |

[0820] However, analysis of potential off-target sites elsewhere in the genome (outside of the RPLP0 locus) for the gRNAs in Table 8 reveal several identical or almost identical target binding sites for the gRNAs in other essential genes associated with ribosomal structure or function, likely due to the highly conserved nature of ribosomal genes (data not shown). Transfecting cells with RNPs containing the gRNAs from Table 8 could potentially kill most of the cells by introducing indels at other essential genes besides RPLP0, even in the presence of a donor plasmid designed to restore the edited RPLP0 gene, as described in Example 2. Additionally, and/or alternatively, off-targets may titrate away RNP complexes from the primary target locus, resulting in a reduced editing rate, and reduction of desired integration events. Thus, these particular gRNA targeting sites in RPLP0 were discounted as possible candidates for a knock-in integration and selection approach as described herein.

### Example 6: Assessment of RPL13A as a Candidate Essential Gene for Knock-Out Through Targeted Integration

[0821] The knock-in integration and selection approach described in Example 2 was evaluated for potential use in targeting other essential genes in cells. The RPL13A gene is associated with ribosomes but is not required for canonical ribosome function and has extra-ribosomal functions. It is involved in the methylation of rRNA and is generally used as a housekeeping gene in RT-qPCR assays.

[0822] Exemplary AsCpf1 (AsCas12a) guide RNAs that target terminal exons of the RPL13A gene are shown in Table 9 below. The guide RNAs are all 41-mer RNA molecules with the following design: 5′-UAAUUUCUACUCUUGUAGAU-[21-mer targeting domain sequence]-3′ (SEQ ID NO: 90). FIG. 9 and FIG. 10 map these guides to terminal exons of the RPL13A gene.

TABLE 9
Guide RNA sequences

| SEQ | | gRNA |
|---|---|---|
| ID NO: | Name | targeting domain sequence (RNA) |
| 136 | RPL13A-1 | UUCUCCACGUUCUUCUCGGCC |
| 137 | RPL13A-2 | UCAAUUUUCUUCUCCACGUUC |
| 138 | RPL13A-3 | CGUAGCCUCUGCCAAGAAUAA |
| 139 | RPL13A-4 | UUGGGCUCAGACCAGGAGUCC |

[0823] However, analysis of potential off-target sites elsewhere in the genome (outside of the RPL13A locus) for the gRNAs in Table 9 reveal several identical or almost identical target binding sites for the gRNAs in other essential genes associated with ribosomal structure or function, likely due to the highly conserved nature of ribosomal genes (data not shown). Transfecting cells with RNPs containing the gRNAs from Table 9 could potentially kill most of the cells by introducing indels at other essential genes besides RPL13A, even in the presence of a donor plasmid designed to restore the edited RPL13A gene, as described in Example 2. Additionally, and/or alternatively, off-targets may titrate away RNP complexes from the primary target locus, resulting in a reduced editing rate, and reduction of desired integration events. Thus, these particular gRNA targeting sites in RPL13A were discounted as possible candidates for a knock-in integration and selection approach as described herein.

### Example 7: Assessment of RPL7 as a Candidate Essential Gene for Knock-Out Through Targeted Integration

[0824] The knock-in integration and selection approach described in Example 2 was evaluated for potential use in targeting other essential genes in cells, e.g., ribosomal genes such as the RPL7 gene in cells. The RPL7 gene encodes a ribosomal protein that is a component of the 60S subunit. This ribosomal protein binds to G-rich structures in 28S rRNA and in mRNA and plays a regulatory role in the translation apparatus.

[0825] Exemplary AsCpf1 (AsCas12a) guide RNAs that target terminal exons of the RPL7 gene are shown in Table 10 below. The guide RNAs are all 41-mer RNA molecules with the following design: 5′-UAAUUUCUACUCUUGUAGAU-[21-mer targeting domain sequence]-3′ (SEQ ID NO: 90). FIG. 11 and FIG. 12 map these guides to terminal exons of the RPL7 gene.

TABLE 10
Guide RNA sequences

| SEQ | | gRNA |
|---|---|---|
| ID NO: | Name | targeting domain sequence (RNA) |
| 140 | RPL7-1 | AUUCAUGAGAUCUAUACUGUU |
| 141 | RPL7-2 | CAACAGUAUAGAUCUCAUGAA |
| 142 | RPL7-3 | AAGCGUUUUCCAACAGUAUAG |
| 143 | RPL7-4 | CCUCUUUGAAGCGUUUUCCAA |
| 144 | RPL7-5 | AAGGGCCACAGGAAGUUAUUU |
| 145 | RPL7-6 | UUCAUUCCACCUCGUGGAGAA |
| 146 | RPL7-7 | GUAGAAGGUGGAGAUGCUGGC |
| 147 | RPL7-8 | UCAGGAUGAGGUCUCUCACCU |

[0826] However, analysis of potential off-target sites elsewhere in the genome (outside of the RPL7 locus) for the gRNAs in Table 10 reveal several identical or almost identical target binding sites for the gRNAs in other essential genes associated with ribosomal structure or function, likely due to the highly conserved nature of ribosomal genes (data not shown). Transfecting cells with RNPs containing the gRNAs from Table 10 could potentially kill most of the cells by introducing indels at other essential genes besides RPL7, even in the presence of a donor plasmid designed to restore the edited RPL7 gene, as described in Example 2. Additionally, and/or alternatively, off-targets may titrate away RNP complexes from the primary target locus, resulting in a reduced editing rate, and reduction of desired integration events. Thus, these particular gRNA targeting sites in RPL7 were discounted as possible candidates for a knock-in integration and selection approach as described herein.

### Example 8: Rescue of TBP Knock-Out Through Targeted Integration

[0827] The knock-in integration and selection approach described in Example 2 was used to target the TBP gene in iPSCs. While iPSCs were tested for the purposes of this experiment, the described methods could be applied to other cell types. The TBP gene encodes TATA-box binding protein, a transcriptional regulator that plays a key role in the transcription initiation apparatus. AsCpf1 (AsCas12a) guide RNAs that target terminal exons of the TBP gene are shown in Table 11 below. The guide RNAs are all 41-mer RNA molecules with the following design: 5′-UAAUUUCUACUCUUGUAGAU-[21-mer targeting domain sequence]-3′ (SEQ ID NO: 90).

TABLE 11
Guide RNA sequences

| | Target | gRNA targeting | | |
|---|---|---|---|---|
| Name | Site | domain sequence (RNA) | Location | Plasmid |
| TBP-1 | RSQ33502 | AAAUGCUUCAUAAAUUUCUGC | Isoform 1 exon 8; | PLA1615 |
| | (SEQ ID | | isoform 2 exon 7 | |
| | NO: 148) | | | |
| TBP-2 | RSQ33503 | UGCUCUGACUUUAGCACCUAA | Isoform 1 exon 8; | PLA1616 |
| | (SEQ ID | | isoform 2 exon 7 | |
| | NO: 149) | | | |
| TBP-3 | RSQ33504 | AAAACAUGUACCCUAUUCUAA | Isoform 1 exon 8; | PLA1617 |
| | (SEQ ID | | isoform 2 exon 7 | |
| | NO: 150) | | | |

[0828] RSQ33502, RSQ33503, and RSQ33504 (SEQ ID NO: 148-150) described in Table 11 were each determined to be highly specific to TBP and have minimal off-target sites in the genome (data not shown). The TBP gene was thus considered a good candidate gene target for the cargo integration and selection methods described herein at least in part because there are gRNAs available capable of very specifically targeting a terminal exon (mRNA isoform 1 exon 8, or mRNA isoform 2 exon 7 respectively). However, for any of these gRNAs to be highly suitable for the methods described herein, they need to be highly effective at introducing indels at a location in the TBP locus that would knock out and/or severely reduce gene function.

[0829] Each of these gRNAs was then tested to determine whether it could be used to knock-in a cassette comprising a portion of TBP and an in-frame cargo sequence encoding GFP into a terminal exon of the TBP gene of cells, in the process rescuing the lethal phenotype that would otherwise result by introducing RNP-induced indels into the coding region of this essential gene. If the tested gRNA was effective at introducing indels at a location of TBP important for function at a high frequency, then transfected cells that do not undergo HDR to incorporate the knock-in cassette would be expected to die, resulting in a large population of the cells expressing GFP from the TBP locus. Specifically, iPSC cells were contacted with an RNP containing AsCas12a (SEQ ID NO: 62), and RSQ33502, RSQ33503 or RSQ33504 (SEQ ID NOs: 148-150), along with a double stranded DNA donor template (dsDNA plasmid) designed to mediate HDR at each respective gRNA target binding site. The double stranded DNA donor templates included a knock-in cassette with a coding sequence for GFP (“Cargo”) in frame with and downstream (3′) of a codon optimized version of a portion of the final TBP exon coding sequence (mRNA isoform 1 exon 8, or mRNA isoform 2 exon 7 respectively) and a sequence encoding the P2A self-cleaving peptide (“P2A”), similar to the dsDNA plasmid described in Example 2 for GAPDH. The TBP sequence in the double stranded DNA donor templates (PLA1615, PLA1616, or PLA1617; comprising donor template SEQ ID NOs: 47, 49, or 50) was codon optimized to prevent further binding by the accompanying guide RNA molecule (RSQ33502, RSQ33503 or RSQ33504). The knock-in cassette also included 3′ UTR and polyA signal sequences downstream of the Cargo sequence. An RNP containing RSQ33502 was administered with PLA1615 (comprising donor template SEQ ID NO: 47); RSQ33503 was administered with PLA1616 (comprising donor template SEQ ID NO: 49); and RSQ33504 was administered with PLA1617 (comprising donor template SEQ ID NO: 50). Each particular dsDNA plasmid (PLA) contained a donor template with homology arms and a knock-in cassette designed to specifically encompass and render ineffective the particular gRNA target site following knock-in cassette integration.

[0830] Flow cytometry was performed 7 days following nucleofection and was used to help determine to what extent each plasmid based knock-in cassette was integrated successfully at its respective TBP target site. FIG. 17A shows that cells nucleofected with RNPs containing RSQ33503 exhibited the greatest amounts of GFP expression relative to cells nucleofected with the other RNPs, suggesting that the GFP-encoding knock-in cassette integrated successfully at high levels within these cells. FIG. 18 shows that approximately 76% of the cells nucleofected with RNPs containing RSQ33503 (SEQ ID NO: 149) and the PLA1616 (comprising donor template SEQ ID NO: 49) plasmid expressed GFP compared to only about 1% of cells nucleofected with the PLA1616 plasmid alone (no RNP control). Cells nucleofected with RNPs containing RSQ33504 (SEQ ID NO: 150) also exhibited high levels of GFP expression, also suggesting higher knock-in cassette integration levels (FIG. 17A). Cells nucleofected with RNPs containing RSQ33502 (SEQ ID NO: 148) displayed much lower GFP expression, indicating that the knock-in cassette did not integrate successfully in most of these cells (FIG. 17A). FIG. 17B shows that use of the RNP containing RSQ33503 (SEQ ID NO: 149) resulted in about 80% editing, which correlated with the higher GFP expression level depicted in FIG. 17A. The percentage editing was measured two days following transfection and was determined by ICE assays (as described in Hsiau et al., Inference of CRISPR Edits from Sanger Trace Data. BioRxiv, 251082, August 2019). Use of the RNP containing RSQ33502 (SEQ ID NO: 148) resulted in a relatively low editing percentage, which correlated with the low GFP expression in FIG. 17A. FIG. 17C shows the relative integrated “cargo” (GFP) expression intensity of the edited cells. Finally, a ddPCR assay was conducted to determine the percent knock-in of the GFP cargo into the TBP alleles of the cells nucleofected with RNPs containing RSQ33503 (SEQ ID NO: 149) and the PLA1616 donor plasmid (comprising donor template SEQ ID NO: 49). FIG. 19 shows by ddPCR that over 40% of the TBP alleles had the GFP-encoding cassette successfully knocked-in.

### Example 9: Rescue of E2F4 Knock-Out Through Targeted Integration

[0831] The knock-in integration and selection approach described in Example 2 was used to target the E2F4 gene in iPSCs. While iPSCs were tested for the purposes of this experiment, the described methods could be applied to other cell types. The E2F4 gene encodes E2F Transcription Factor 4. This transcriptional regulator plays a key role in cell cycle regulation. AsCpf1 (AsCas12a) guide RNAs that target terminal exons of the E2F4 gene are shown in Table 12 below. The guide RNAs are all 41-mer RNA molecules with the following design: 5′-UAAUUUCUACUCUUGUAGAU-[21-mer targeting domain sequence]-3′ (SEQ ID NO: 90).

TABLE 12
Guide RNA sequences

| | Target | gRNA targeting | | |
|---|---|---|---|---|
| Name | Site | domiain sequence (RNA) | Location | Plasmid |
| E2F4-1 | RSQ33505 | CCCCUCUGCUUCGUCUUUCUC | Exon 10 | PLA1626 |
| | (SEQ ID NO: 151) | | | |
| E2F4-2 | RSQ33506 | UCCACCCCCGGGAGACCACGA | Exon 10 | PLA1627 |
| | (SEQ ID NO: 152) | | | |
| E2F4-3 | RSQ33507 | AUGUGCCUGUUCUCAACCUCU | Exon 10 | PLA1628 |
| | (SEQ ID NO: 153) | | | |

[0832] RSQ33505, RSQ33506, and RSQ33507 (SEQ ID NOs: 151-153) were each determined to be highly specific to E2F4 and have minimal off-target sites in the genome (data not shown). The E2F4 gene was thus considered a good candidate gene target for the cargo integration and selection methods described herein at least in part because there are gRNAs available that are capable of very specifically targeting a terminal exon (exon 10). However, for any of these gRNAs to be highly suitable for the methods described herein, they need to be highly effective at introducing indels at a location in the E2F4 locus that would knock out or severely reduce gene function.

[0833] The gRNAs RSQ33505, RSQ33506, and RSQ33507 (SEQ ID NOs: 151-153) were then tested to determine whether they could be used to knock-in a cassette comprising a portion of E2F4 and a cargo sequence encoding GFP into a terminal exon of the E2F4 locus of cells, in the process rescuing the lethal phenotype that would otherwise result by introducing RNP-induced indels into the coding region of this essential gene at a high frequency. Specifically, iPSCs were contacted with an RNP containing AsCas12a (SEQ ID NO: 62), and RSQ33505, RSQ33506, or RSQ33507 (SEQ ID NOs: 151-153) along with a double stranded DNA donor template (dsDNA plasmid) designed to mediate HDR at each respective gRNA target binding site. The double stranded DNA donor templates included a knock-in cassette with a coding sequence for GFP (“Cargo”) in frame with and downstream (3′) of a codon optimized version of the final E2F4 exon coding sequence (exon 10) and a sequence encoding the P2A self-cleaving peptide (“P2A”), similar to the dsDNA plasmid described in Example 2 for GAPDH. The E2F4 sequence in the double stranded DNA donor templates (PLA1626, PLA1627, or PLA1628; comprising donor template SEQ ID NOs: 52-54) was codon optimized to prevent further binding by the accompanying guide RNA molecule (RSQ33505, RSQ33506 or RSQ33507; SEQ ID NOs: 151-153). The knock-in cassette also included 3′ UTR and polyA signal sequences downstream of the Cargo sequence. An RNP containing RSQ33505 (SEQ ID NO: 151) was administered with PLA1626 (comprising donor template SEQ ID NO: 52); RSQ33506 (SEQ ID NO: 152) was administered with PLA1627 (comprising donor template SEQ ID NO: 53); and RSQ33507 (SEQ ID NO: 153) was administered with PLA1628 (comprising donor template SEQ ID NO: 54). Each particular dsDNA plasmid (PLA) contained a donor template with homology arms and a knock-in cassette designed to specifically encompass and render ineffective the particular gRNA target site following integration.

[0834] Flow cytometry was performed 7 days following nucleofection and was used to help determine to what extent each plasmid based knock-in cassette was integrated successfully at its respective E2F4 target site. FIG. 17A shows that cells nucleofected with RNPs containing RSQ33505 (SEQ ID NO: 151) exhibited the greatest amount of GFP expression relative to cells nucleofected with the other RNPs targeting E2F4, suggesting that the GFP-encoding knock-in cassette integrated successfully in many of these cells. Cells nucleofected with RNPs containing RSQ33506 or RSQ33507 (SEQ ID NOs: 152 and 153) displayed much lower GFP expression, indicating that the knock-in cassette did not integrate successfully in most of these cells (FIG. 17A). FIG. 17B shows that use of RNP containing RSQ33505 (SEQ ID NO: 151) or RSQ33506 (SEQ ID NO: 152) resulted in approximately 15% and approximately 20% editing rates respectively, when measured 48 hours after RNP transfection. The relatively lower observed editing rate for RSQ33505 (SEQ ID NO: 151) may be considered to unexpectedly correlate with a relatively high level of GFP integration in E2F4 (as observed in FIG. 17A), and could partially be the result of significant death within the population of edited cells at 48 hours. The percentage editing was measured two days following transfection and was determined by ICE assays (as described in Hsiau et al., August 2019). FIG. 17C shows the relative integrated “cargo” (GFP) expression intensity of the edited cells.

### Example 10: Rescue of G6PD Knock-Out Through Targeted Integration

[0835] The knock-in integration and selection approach described in Example 2 was used to target the G6PD gene in iPSCs. While iPSCs were tested for the purposes of this experiment, the described methods could be applied to other cell types. The G6PD gene encodes Glucose-6-Phosphate Dehydrogenase. This metabolic enzyme plays a key role in glycolysis and NADPH production. An AsCpf1 (AsCas12a) guide RNA that targets terminal exons of the G6PD gene is shown in Table 13 below.

TABLE 13
Guide RNA sequences

| | Target | gRNA targeting | | |
|---|---|---|---|---|
| Name | Site | domain sequence (RNA) | Location | Plasmid |
| G6PD-1 | RSQ33508 | CAGUAUGAGGGCACCUACAAG | Exon 13 | PLA1618 |
| | (SEQ ID NO: 154) | | | |

[0836] RSQ33508 (SEQ ID NO: 154) was determined to be highly specific to G6PD and has minimal off-target sites in the genome (data not shown). The G6PD gene was thus considered a good candidate gene target for the cargo integration and selection methods described herein at least in part because there are gRNAs available that are capable of specifically targeting a terminal exon (exon 13).

[0837] The gRNA RSQ33508 (SEQ ID NO: 154) was then tested to determine whether it could be used to knock-in a cassette comprising a portion of G6PD and a cargo sequence encoding GFP into a terminal exon of the G6PD locus of cells, in the process rescuing the lethal phenotype that would otherwise result by introducing RNP-induced indels into the coding region of this essential gene at a high frequency. Specifically, iPSCs were contacted with an RNP containing AsCas12a (SEQ ID NO: 62), and RSQ33508 (SEQ ID NO: 154) along with a double stranded DNA donor template (dsDNA plasmid) designed to mediate HDR at the gRNA target binding site. The double stranded DNA donor templates included a knock-in cassette with a coding sequence for GFP (“Cargo”) in frame with and downstream (3′) of a codon optimized version of the final G6PD exon coding sequence (exon 13) and a sequence encoding the P2A self-cleaving peptide (“P2A”), similar to the dsDNA plasmid described in Example 2 for GAPDH. The G6PD sequence in the double stranded DNA donor templates (PLA1618; comprising donor template SEQ ID NO: 51) was codon optimized to prevent further binding by the accompanying guide RNA molecule (RSQ33508). The knock-in cassette also included 3′ UTR and polyA signal sequences downstream of the Cargo sequence. An RNP containing RSQ33508 (SEQ ID NO: 154) was administered with PLA1618 (comprising donor template SEQ ID NO: 51). The dsDNA plasmid (PLA) contained a donor template with homology arms and a knock-in cassette designed to specifically encompass and render ineffective the accompanying gRNA target site following integration.

[0838] Flow cytometry was performed 7 days following nucleofection and was used to help determine to what extent the plasmid based knock-in cassette was integrated successfully at its G6PD target site. FIG. 17A shows that cells nucleofected with RNPs containing RSQ33508 (SEQ ID NO: 154) exhibited GFP expression in approximately 10% of assayed cells, suggesting that the GFP-encoding knock-in cassette integrated at relatively low levels within these cells. FIG. 17C shows the relative integrated “cargo” (GFP) expression intensity of the edited cells.

### Example 11: Rescue of KIF11 Knock-Out Through Targeted Integration

[0839] The knock-in integration and selection approach described in Example 2 was used to target the KIF11 gene in iPSCs. While iPSCs were tested for the purposes of this experiment, the described methods could be applied to other cell types. The KIF11 gene encodes Kinesin Family Member 11. This enzyme plays a key role in vesicle movement along intracellular microtubules and chromosome positioning during mitosis. AsCpf1 (AsCas12a) guide RNAs that target terminal exons of the KIF11 gene are shown in Table 14 below.

TABLE 14
Guide RNA sequences

| | | gRNA targeting | | |
|---|---|---|---|---|
| Name | Target Site | domain sequence (RNA) | Location | Plasmid |
| KIF11-1 | RSQ33509 | CCGCCUUAAAUCCACAGCAUA | Intron 21/ | PLA1629 |
| | (SEQ ID NO: 155) | | Exon 22 | |
| KIF11-2 | RSQ33510 | UAACCAAGUGCUCUGUAGUUU | Exon 22 | PLA1630 |
| | (SEQ ID NO: 156) | | | |
| KIF11-3 | RSQ33511 | GACCUCUCCAGUGUGUUAAUG | Exon 22 | PLA1631 |
| | (SEQ ID NO: 157) | | | |

[0840] RSQ33509, RSQ33510, and RSQ33511 (SEQ ID NOs: 155-157) were each determined to be highly specific to KIF11 and have minimal off-target sites in the genome (data not shown). The KIF11 gene was thus considered a good candidate gene target for the cargo integration and selection methods described herein at least in part because there are gRNAs available that are capable of very specifically targeting a terminal exon available (exon 22). However, for any of these gRNAs to be highly suitable for the methods described herein, they need to be highly effective at introducing indels at a location in the KIF11 locus that would knock out or severely reduce gene function.

[0841] Each of these gRNAs was then tested to determine whether it could be used to knock-in a cassette comprising a portion of KIF11 and a cargo sequence encoding GFP into a terminal exon of the KIF11 locus of cells, in the process rescuing the lethal phenotype that would otherwise result by introducing RNP-induced indels into the coding region of this essential gene at a high frequency. Specifically, iPSC cells were contacted with an RNP containing AsCas12a (SEQ ID NO: 62), and RSQ33509, RSQ33510, or RSQ33511 (SEQ ID NOs: 155-157), along with a double stranded DNA donor template (dsDNA plasmid) designed to mediate HDR at each respective gRNA target binding site. The double stranded DNA donor templates included a knock-in cassette with a coding sequence for GFP (“Cargo”) in frame with and downstream (3′) of a codon optimized version of the final KIF11 exon coding sequence (exon 22) and a sequence encoding the P2A self-cleaving peptide (“P2A”), similar to the dsDNA plasmid described in Example 2 for GAPDH. The KIF11 sequence in the double stranded DNA donor templates (PLA1629, PLA1630, or PLA1631; comprising donor template SEQ ID NOs: 55-57) was codon optimized to prevent further binding by the accompanying guide RNA molecule (RSQ33509, RSQ33510, or RSQ33511; SEQ ID NOs: 155-157). The knock-in cassette also included 3′ UTR and polyA signal sequences downstream of the Cargo sequence. An RNP containing RSQ33509 (SEQ ID NO: 155) was administered with the PLA1629 plasmid (comprising donor template SEQ ID NO: 55); RSQ33510 (SEQ ID NO: 156) was administered with PLA1630 (comprising donor template SEQ ID NO: 56); and RSQ33511 (SEQ ID NO: 157) was administered with PLA1631 (comprising donor template SEQ ID NO: 57). Each particular dsDNA plasmid (PLA) contained a donor template with homology arms and a knock-in cassette designed to specifically encompass and render ineffective the particular gRNA target site following integration.

[0842] Flow cytometry was performed 7 days following nucleofection and was used to help determine to what extent each plasmid knock-in cassette was integrated successfully at its respective KIF11 target site. FIG. 17A shows that cells nucleofected with RNPs containing RSQ33509 (SEQ ID NO: 155) exhibited the greatest amount of GFP expression relative to cells nucleofected with the other RNPs targeting KIF11, suggesting that the GFP-encoding knock-in cassette integrated successfully in many of these cells. Cells nucleofected with RNPs containing RSQ33510 or RSQ33511 (SEQ ID NO: 156 or 157) also exhibited some GFP expression (FIG. 17A). FIG. 17B shows that use of the RNPs containing RSQ33509 (SEQ ID NO: 155) resulted in about 40% editing at 48 hours following transfection (the lower level possibly a result of significant cell death in the cell population at this time), correlating with the GFP expression levels depicted in FIG. 17A. Interestingly, FIG. 17B shows that use of RNPs containing RSQ33510 (SEQ ID NO: 156) resulted in about 90% observed editing rates, while RNPs containing RSQ33511 (SEQ ID NO: 157) resulted in about 65% observed editing rates, yet the GFP expression in cells transfected with these guides was relatively low when compared to RSQ33509 (SEQ ID NO: 155) transfected cells. These results suggest that the RSQ33510 or RSQ33511 (SEQ ID NO: 156 or 157) guides may not have been generating sufficiently deleterious indels in KIF11, allowing a high proportion cells to be viable despite high editing efficiencies, such that transfected cells were not dying in large enough numbers to allow for effective selection of transfected cells with successful cargo knocked in. Thus, although the RSQ33510 and RSQ33511 (SEQ ID NO: 156 or 157) gRNAs are highly specific for their KIF11 target sites (with minimal off-targets) and exhibit high editing levels, they may still not be suitable gRNAs for the selection mechanisms described herein as they may not induce toxic indels that result in sufficient malfunction of KIF11, which in turn would lead to cell death if homologous recombination of a rescue knock-in cassette does not occur. The percentage editing was measured two days following transfection and was determined by ICE assays (as described in Hsiau et al., August 2019).

### Example 12: Knock-In of Cargo at Essential Gene Loci Using a Viral Vector

[0843] The present example describes use of the gene editing methods described herein comprising viral vector transduction of a cell population.

[0844] The target cells described herein are collected from a donor subject or a subject in need to therapy (e.g., a patient). Following an appropriate sorting, culturing, and/or differentiation process, target cells are transduced with at least one AAV vector comprising a nucleotide sequence comprising a gRNA, a suitable nuclease, and/or a suitable rescue construct. Cells are sorted using flow cytometry to determine successful transduction, editing, integration, and/or expression events.

[0845] A population of hematopoietic stem cells are transduced with an AAV vector (e.g., AAV6) comprising GAPDH targeting RNP (including Cas12a of SEQ ID NO: 62 and gRNA RSQ22337 of SEQ ID NO: 95) and PLA1593 (comprising donor template SEQ ID NO: 44). Successful transduction, editing, knock-in cassette integration, and/or expression events are determined using flow cytometry, as described herein. Following AAV transduction, a large proportion of the cells are edited at the GAPDH locus by the RNP and have integrated the knock-in cassette via HDR. A population of hematopoietic stem cells are transduced with an AAV vector (e.g., AAV6) comprising TBP targeting RNP (including Cas12a of SEQ ID NO: 62 and gRNA RSQ33503 of SEQ ID NO: 149) and PLA1616 (comprising donor template SEQ ID NO: 49). Successful transduction, editing, integration, and/or expression events are determined using flow cytometry, as described herein. Following AAV transduction, a large proportion of the cells are edited at the TBP locus by the RNP and have integrated the knock-in cassette via HDR.

[0846] A population of T cells are transduced with an AAV vector (e.g., AAV6) comprising GAPDH targeting RNP (including Cas12a of SEQ ID NO: 62 and gRNA RSQ22337 of SEQ ID NO: 95) and PLA1593 (comprising donor template SEQ ID NO: 44). Successful transduction, editing, knock-in cassette integration, and/or expression events are determined using flow cytometry, as described herein. Following AAV transduction, a large proportion of the cells are edited at the GAPDH locus by the RNP and have integrated the knock-in cassette via HDR. A population of T cells are transduced with an AAV vector (e.g., AAV6) comprising TBP targeting RNP (including Cas12a of SEQ ID NO: 62 and gRNA RSQ33503 of SEQ ID NO: 149) and PLA1616 (comprising donor template SEQ ID NO: 49). Successful transduction, editing, integration, and/or expression events are determined using flow cytometry, as described herein. Following AAV transduction, a large proportion of the cells are edited at the TBP locus by the RNP and have integrated the knock-in cassette via HDR.

[0847] A population of NK cells are transduced with an AAV vector (e.g., AAV6) comprising GAPDH targeting RNP (including Cas12a of SEQ ID NO: 62 and gRNA RSQ22337 of SEQ ID NO: 95) and PLA1593 (comprising donor template SEQ ID NO: 44). Successful transduction, editing, knock-in cassette integration, and/or expression events are determined using flow cytometry, as described herein. Following AAV transduction, a large proportion of the cells are edited at the GAPDH locus by the RNP and have integrated the knock-in cassette via HDR. A population of NK cells are transduced with an AAV vector (e.g., AAV6) comprising TBP targeting RNP (including Cas12a of SEQ ID NO: 62 and gRNA RSQ33503 of SEQ ID NO: 149) and PLA1616 (comprising donor template SEQ ID NO: 49). Successful transduction, editing, knock-in cassette integration, and/or expression events are determined using flow cytometry, as described herein. Following AAV transduction, a large proportion of the cells are edited at the TBP locus by the RNP and have integrated the knock-in cassette via HDR.

[0848] A population of tumor-infiltrating lymphocytes (TILs) are transduced with an AAV vector (e.g., AAV6) comprising GAPDH targeting RNP (including Cas12a of SEQ ID NO: 62 and gRNA RSQ22337 of SEQ ID NO: 95) and PLA1593 (comprising donor template SEQ ID NO: 44). Successful transduction, editing, knock-in cassette integration, and/or expression events are determined using flow cytometry, as described herein. Following AAV transduction, a large proportion of the cells are edited at the GAPDH locus by the RNP and have integrated the knock-in cassette via HDR. A population of tumor-infiltrating lymphocytes (TILs) are transduced with an AAV vector (e.g., AAV6) comprising TBP targeting RNP (including Cas12a of SEQ ID NO: 62 and gRNA RSQ33503 of SEQ ID NO: 149) and PLA1616 (comprising donor template SEQ ID NO: 49). Successful transduction, editing, knock-in cassette integration, and/or expression events are determined using flow cytometry, as described herein. Following AAV transduction, a large proportion of the cells are edited at the TBP locus by the RNP and have integrated the knock-in cassette via HDR.

[0849] A population of neurons are transduced with an AAV vector (e.g., AAV6) comprising GAPDH targeting RNP (including Cas12a of SEQ ID NO: 62 and gRNA RSQ22337 of SEQ ID NO: 95) and PLA1593 (comprising donor template SEQ ID NO: 44). Successful transduction, editing, knock-in cassette integration, and/or expression events are determined using flow cytometry, as described herein. Following AAV transduction, a large proportion of the cells are edited at the GAPDH locus by the RNP and have integrated the knock-in cassette via HDR. A population of neurons are transduced with an AAV vector (e.g., AAV6) comprising TBP targeting RNP (including Cas12a of SEQ ID NO: 62 and gRNA RSQ33503 of SEQ ID NO: 149) and PLA1616 (comprising donor template SEQ ID NO: 49). Successful transduction, editing, knock-in cassette integration, and/or expression events are determined using flow cytometry, as described herein. Following AAV transduction, a large proportion of the cells are edited at the TBP locus by the RNP and have integrated the knock-in cassette via HDR.

### Example 13: Knock-In of Cargo at Essential Gene Loci Using a Viral Vector

[0850] The present example describes gene editing of populations of T cells using methods described herein comprising viral vector transduction of populations of T cells. The methods described herein can be applied to other cell types as well, such as other immune cells.

[0851] T cells were thawed in a bead bath as known in the art and were removed from the bath on day two. Cells were electroporated on day four after thawing, in brief 250,000 T cells per well in a Lonza 96-well cuvette were suspended in buffer P2 and electroporated using pulse code CA-137 with varying concentrations of RNP comprising gRNA RSQ22337 (SEQ ID NO: 95) and Cas12a (SEQ ID NO: 62) targeting the GAPDH gene (404 RNP, 204 RNP, 1 μM RNP, or 0.5 μM RNP). Appropriate media was added to cells immediately after electroporation and cells were allowed to recover for 15 minutes. AAV6 viral particles comprising a donor plasmid construct containing a knock-in cassette with a GFP cargo were then added to T cells at varying multiplicity of infection (MOI) concentrations (5E4, 2.5E4, 1.25E4, 6.25E3, 3.13E3, 1.56E3, or 7.81E2). The donor plasmid was designed as described in Example 2, with a 5′ codon-optimized coding portion of GAPDH exon 9 optimized to prevent further binding of the gRNA targeting domain sequence of the guide RNA (RSQ22337)), an in-frame sequence encoding the P2A self-cleaving peptide (“P2A”), an in-frame coding sequence for GFP (“Cargo”), a stop codon and polyA signal sequence. T cells were split two days later, and then every 48 hours until they were analyzed by flow cytometry. T cells were sorted using flow cytometry seven days post electroporation to determine successful transduction, transformation, editing, knock-in cassette integration, and/or expression events (see FIG. 20, FIG. 21, FIG. 22A, and FIG. 22B). As shown in FIG. 20, populations of T cells were transduced with 4 μM RNP, 2 μM RNP, 1 μM RNP, or 0.5 μM RNP, at various AAV6 multiplicity of infection (MOI) (5E4, 2.5E4, 1.25E4, 6.25E3, 3.13E3, 1.56E3, or 7.81E2). High proportions of GFP integration at the GAPDH gene were observed in T cell populations transduced/transformed with all RNP concentrations at 5E4 AAV6 MOI and were observed with RNP concentrations greater than 1 μM when cells were transduced with AAV6 MOI as low as 1.25E4 (see FIGS. 20 and 22A). Control experiments with no AAV transduction resulted in T cell populations that displayed no GFP integration events (see FIG. 22B). T cell viability was measured four days after cells were transformed with RNPs and AAV6 at various MOI (FIG. 21).

[0852] Furthermore, knock-in efficiencies using methods described herein were compared to optimized versions of methods known in the art. In brief, T cell populations were transduced with AAV6 vector comprising a donor template suitable for knock-in of GFP at the GAPDH gene as described herein, and were transformed with gRNA RSQ22337 (SEQ ID NO: 95) and Cas12a (SEQ ID NO: 62) as described above; alternatively, T cell populations were subject to highly optimized GFP knock-in at the TRAC locus using AAV6 vector transduction (see e.g., Vakulskas et al. A high-fidelity Cas9 mutant delivered as a ribonucleoprotein complex enables efficient gene editing in human hematopoietic stem and progenitor cells. Nat Med. 2018; 24(8):1216-1224). Flow cytometry was utilized to measure knock-in efficiency (determined by percentage of T cell population expressing GFP, measured 7 days post-electroporation). Knock-in rates at the TRAC locus were high (˜50%) when compared to publicly described integration frequencies for similar methodologies, however, knock-in efficiency at the GAPDH gene using methods described herein facilitated by AAV6 transduction were significantly (p=0.0022 using unpaired t-test) higher (˜68%) (see FIG. 23). The same RNP concentration, AAV6 MOI, and homology arm lengths were utilized in both experiments, averaged results from three independent biological replicates are shown (see FIG. 23). Thus, the methods described herein can be used to isolate a population of modified cells, such as immune cells like T cells, that highly express a gene of interest relative to other gene knock-in methods.

### Example 14: CD16 Knock-In iPSCs Give Rise to Edited iNKs with Enhanced Function

[0853] The present example describes use of gene editing methods described herein to create modified immune cells suitable for killing cancer cells.

[0854] PSCs were edited using the exemplary system illustrated in FIGS. 3A, 3B, and 3C, and described in Example 2. In brief, the GAPDH gene was targeted in iPSCs using AsCpf1 (SEQ ID NO: 62), and a guide RNA (RSQ22337) (SEQ ID NO: 95), resulting in a double-strand break towards the 5′ end of the last exon of GAPDH (exon 9). The CRISPR/Cas nuclease and guide RNA were introduced into cells by nucleofection (electroporation) of a ribonucleoprotein (RNP) according to known methods. The cells were also contacted with a double stranded DNA donor template (dsDNA plasmid, comprising donor template SEQ ID NO: 205) that included a donor template comprising in 5′-to-3′ order, a 5′ homology arm approximately 500 bp in length (comprising a 3′ portion of exon 8, intron 8, and a 5′ codon-optimized coding portion of exon 9 optimized to prevent further binding of the gRNA targeting domain sequence of the guide RNA (RSQ22337)), an in-frame sequence encoding the P2A self-cleaving peptide (“P2A”), an in-frame coding sequence for CD16 (“Cargo”) (a non-cleavable CD 16; SEQ ID NO: 165), a stop codon and polyA signal sequence, and a 3′ homology arm approximately 500 bp in length (comprising a coding portion of exon 9 including a stop codon, the 3′ non-coding exonic region of exon 9, and a portion of the downstream intergenic sequence) (as shown in FIG. 3B).

[0855] The cargo gene CD16 was successfully integrated into the GAPDH gene of iPSCs at high efficiencies using the selection systems described herein. FIG. 24A shows the efficiency of CD16-encoding “cargo” integration in the GAPDH gene at 0 days post-electroporation and at 19 days post-electroporation in iPSCs transformed with RNPs at a concentration of 4 μM and the dsDNA plasmid encoding CD16, or in “unedited cells” that were not transformed with the dsDNA plasmid. Knock-in was measured in bulk edited CD16 KI cells using ddPCR targeting the 5′ or 3′ position of the knock-in “cargo” using a primer in the 5′ of the gRNA target site or a primer in the 3′ of the site in the poly A region, increasing the reliability of the result. As shown in FIG. 24A, CD16 was stably knocked-in and present in bulk edited cell populations more than two weeks following electroporation and targeted integration of the knock-in cassette.

[0856] From bulk edited cell populations, single cells were propagated to homogenize genotypes. Shown in FIG. 24B are four edited cell populations: homozygous clone 1, homozygous clone 2, heterozygous clone 3, and heterozygous clone 4. The homozygous clones contained two alleles of the GAPDH gene that comprised CD16 knock-in, while heterozygous clones contained one allele of the GAPDH gene that comprised CD16 knock-in (measured using ddPCR of the 5′ and 3′ positions of the knock-in cargo).

[0857] Following confirmation of CD16-encoding “cargo” integration at the GAPDH gene, homogenized cell lines were differentiated into Natural Killer (NK) immune cells using spin embryoid body methods as known in the art. In brief, iPSCs were placed in an ultra-low attachment 96-well plate at 5,000 to 6,000 cells per well in order to form embryoid bodies (EBs). On day 11 EBs were transferred to a flask where they remain for the remainder of the experiment (see Ye Li et al., Cell Stem Cell. 2018 Aug. 2; 23(2): 181-192.e5). At day 32 of the differentiation process, cells were analyzed using flow cytometry methods known in the art. Following standard control gating experiments (see Ye Li et al., Cell Stem Cell. 2018 Aug. 2; 23(2): 181-192.e5), the differentiation process was analyzed using expression of markers CD56 and CD45, following this, co-expression of markers CD56 and CD16 was measured. As shown in FIG. 25A-25D, in general, cells that were positive for CD56 expression were also positive for CD16 expression (98%, 99%, 97.8%, and 99.9% respectively), indicating that both homozygous and heterozygous TI clones had stable and robust CD16 expression levels.

[0858] These differentiated iNK cells comprising knock-in of the gene of interest (CD16) at the GAPDH gene were then subject to challenge by various cancer cell lines to determine their cytotoxic capacity. An exemplary 3D solid tumor killing assay is depicted in FIG. 26. In brief, spheroids were formed by seeding 5,000 NucLight Red labeled SK-OV-3 cells in 96 well ultra-low attachment plates. Spheroids were incubated at 37° C. before addition of effector cells (at different E:T ratios) and any optional agents (e.g., cytokines, antibodies, etc.), spheroids were subsequently imaged every 2 hours using the Incucyte S3 system for up to 600 hours. Data shown are normalized to the red object intensity at time of effector addition. Normalization of spheroid curves maintains the same efficacy patterns observed in non-normalized data. Using this assay, the cytotoxicity of iNKs differentiated from iPSCs comprising knock-in of CD16 at the GAPDH gene was measured.

[0859] As shown in FIGS. 27A and 27B, both homozygous edited iNK lines and both heterozygous edited iNK lines comprising CD16 knocked-in at the GAPDH gene were capable of reducing the size of SK-OV-3 spheroids more effectively than unedited iNK control cells (WT PCS) or control cells with GFP knocked-in to the GAPDH gene (WT GFP KI) (averaged data from 2 assays). The edited homozygous and heterozygous iNK cells comprising CD16 at GAPDH also reduced the size of SK-OV-3 spheroids more effectively than control cells with GFP knocked-in to the GAPDH gene (data not shown). Introduction of 10 μg/mL of the antibody trastuzumab greatly enhanced the killing capacity of the CD16 KI iNKs when compared to control cells, likely as a function of increased antibody dependent cellular cytotoxicity (ADCC) due to increased FcγRIII (CD16) expression levels. The results of a number of solid tumor killing assays were plotted against the CD16 expression levels of CD16 KI edited iNKs (derived from bulk edited iPSCs or singled edited iPSCs). At an E:T ratio of 3.16:1, there is a correlation shown between the percentage of a cell population expressing CD16, and the amount of cell killing that occurred (see FIG. 29).

[0860] To further elucidate the functionality of the edited iNKs, the cells were subjected to repeated exposure to tumor cells, and the ability of the edited iNKs to kill tumor targets repeatedly over a multiday period was analyzed in an in vitro serial killing assay. Results of this experiment are depicted in FIG. 28. At day 0 of the assay, 10×10⁶ Raji tumor cells (a lymphoblast-like cell line of hematopoietic origin) and 2×10⁵ iNKs were plated in each well of a 96-well plate in the presence or absence of 0.1 μg/mL of the antibody rituximab. At approximately 48 hour intervals, a bolus of 5×10³ Raji tumor cells was added to re-challenge the iNK population. As shown in FIG. 28, the edited iNK cells (CD16 KI iNK heterozygous or homozygous) exhibited continued killing of Raji cells after multiple challenges with Raji tumor cells (up to 598 hours), whereas unedited iNK cells were limited in their serial killing effect. The data show that iNK cells comprising homozygous or heterozygous CD16 KI at GAPDH results in prolonged and enhanced tumor cell killing. Furthermore, the efficacy of heterozygous CD16 KI iNKs highlights the potential for biallelic insertion of two different knock-in cassettes, e.g., comprising CD16 in one allele and a different gene of interest in the other allele of a suitable essential gene (e.g., GAPDH, TBP, KIF11, etc.).

### Example 15: Knock-In of Immunologically Relevant Sequences at a Suitable Essential Gene Locus (Monocistronic or Bicistronic)

[0861] Positive targeted integration events at the GAPDH gene and cellular phenotypes were noted for integration of GFP, CD47, or CD16 as described above in Example 2 and Example 15. Additional or alternative cargo sequences may be incorporated into the GAPDH gene or other suitable essential genes as described herein with high integration rates. The essential gene GAPDH was targeted in iPSC cells using an RNP containing AsCpf1 (SEQ ID NO: 62) and a guide RNA (RSQ22337; SEQ ID NO: 95), resulting in a double-strand break towards the 5′ end of the last exon of GAPDH (exon 9), as described in Example 2. A donor plasmid containing a knock-in cassette with the cargo of interest was also electroporated with the RNP. As shown in FIG. 30A, the targeted integration (TI) rates at the GAPDH gene for cargos such as a) CD16, b) a CAR suitable for expression in NK cells, or c) biallelic GFP/mCherry, were all greater than 40% when assayed in two independent iPSC clonal lines when measured using ddPCR. As shown in FIG. 30B, the targeted TI rates at the GAPDH gene for a CXCR2 cargo was at least 29.2% of bulk edited iPSCs (expression determined using flow cytometry), while surface expression of CXCR2 was observed in approximately 8.5% of the bulk edited iPSCs (expression determined using flow cytometry). By contrast, unedited iPSCs very small amounts of CXCR2 (approximately 1%) by flow cytometry (data not shown).

[0862] An exemplary ddPCR experiment was used to measure the targeted integration (TI) rates as follows. In brief, TI was measured using a universal set of primers that captures both the 5′ homology arm and 3′ polyA tail for the GAPDH terminal exon region, and can detect cargos independent of the particular sequence of the specific cargo. The 5′ CDN primer and 3′ PolyA primer and FAM fluorophore probes are made in combination. An appropriate reference gene probe is a TTC5 HEX probe. For the reaction, probes, genomic DNA, BioRad master mix, and 2×control buffer were mixed together in ratios consistent with manufacturer recommendations. First, genomic DNA was placed in the BioRad 96 well plate (9.2 μl total genomic DNA+water), next, master mix with primer probes sets (13.8 μl per well) were added. Water controls comprised a 5′ primer probe set master mix in one well, and a 3′ primer probe set master mix in a different well. For blank well controls, a 50/50 mix of 2×control buffer and water (25 μl total) was added. The auto droplet generator was then prepared and run. Once droplets were generated, the ddPCR plates were sealed at 180° C. and then placed in a thermocycler for amplification. 5′ CDN primer: CATCGCATTGTCTGAGTAGGTGTC (SEQ ID NO: 219), 3′ PolyA primer: TGCCCACAGAATAGCTTCTTCC (SEQ ID NO: 220), FAM probe: TCCCCTCCTCACAGTTGCCA (SEQ ID NO: 221), TTC5 reference gene forward primer: GGAGAAAGTGTCCAGGCATAAG (SEQ ID NO: 222), TTC5 reference gene reverse primer: CTCCATCCCACTATGACCATTC, (SEQ ID NO:223), TTC5 FAM probe: AGTTTGTGTCAGGATGGGTGGT (SEQ ID NO: 224).

[0863] Next, the cargo integration and selection methods described herein were tested using a number of bicistronic knock-in cassettes that contained CD16 and an NK suitable CAR in different 5′-to-3′ orders (e.g., CD16 followed by the CAR, or the CAR followed by CD16) and separated by a P2A or IRES sequence. The essential gene GAPDH was targeted in iPSC cells using an RNP containing AsCpf1 (AsCas12a, (SEQ ID NO: 62)) and a guide RNA (RSQ22337; SEQ ID NO: 95), resulting in a double-strand break towards the 5′ end of the last exon of GAPDH (exon 9), as described in Example 2. A donor plasmid containing each of the knock-in cassettes depicted in FIG. 31 was also electroporated with the RNP. As shown in FIG. 31, the TI rates for the bicistronic constructs comprising CD16 and the NK suitable CAR ranged from 20-70% when measured in the bulk edited cells using ddPCR at day 0 post-transformation. In addition, a membrane bound IL-15 (mbIL-15) cargo gene (a fusion comprising IL-15 linked to a Sushi domain and a full-length IL-15Rα, as depicted in FIG. 32) was also knocked into the GAPDH locus using RNPs comprising (RSQ22337) and Cas12a at a concentration of 4 μM and the dsDNA plasmid encoding mbIL-15 at 5 (PLA1632; comprising donor template SEQ ID NO: 45) to determine if additional genes of interest could be integrated into an essential gene at high levels within a population of edited cells. FIG. 31 shows that the mbIL-15 cargo was knocked into the GAPDH locus at a percentage TI of greater than 50% as measured by ddPCR (day 0 post-transformation). Thus, the methods described herein can be used to isolate populations of edited cells, such as iPSCs, that have very high levels of a gene of interest knocked into an essential gene locus, such as GAPDH.

### Example 16: IL-15 and/or IL-15/IL15-Rα Knock-In iPSCs Give Rise to Edited iNKs with Enhanced Function

[0864] The present example describes use of gene editing methods described herein to create modified immune cells suitable for cancer cell killing.

[0865] PSCs were edited using the exemplary system illustrated in FIGS. 3A, 3B, and 3C, and described in Example 2. In brief, the GAPDH gene was targeted in iPSCs using RNPs containing AsCpf1 (AsCas12a, SEQ ID NO: 62), and a guide RNA (RSQ22337; SEQ ID NO: 95), resulting in a double-strand break towards the 5′ end of the last exon of GAPDH (exon 9). The CRISPR/Cas nuclease and guide RNA were introduced into cells by nucleofection (electroporation) of a ribonucleoprotein (RNP) according to known methods. The cells were also contacted with a double stranded DNA donor template (dsDNA plasmid, PLA) that included a donor template comprising in 5′-to-3′ order, a 5′ homology arm approximately 500 bp in length (comprising a 3′ portion of exon 8, intron 8, and a 5′ codon-optimized coding portion of exon 9 optimized to prevent further binding of the gRNA targeting domain sequence of the guide RNA (RSQ22337)), an in-frame sequence encoding the P2A self-cleaving peptide (“P2A”), an in-frame coding sequence for mbIL-15 as shown in FIG. 32 (“Cargo”) (SEQ ID NO: 172), a stop codon and polyA signal sequence, and a 3′ homology arm approximately 500 bp in length (comprising a coding portion of exon 9 including a stop codon, the 3′ non-coding exonic region of exon 9, and a portion of the downstream intergenic sequence) (as shown in FIG. 3B). The 5′ and 3′ homology arms flanking the cargo coding sequence of the donor template were designed to correspond to sequences located on either side of the endogenous stop codon in the genome of the cell.

[0866] The cargo gene mbIL-15 (as shown in FIG. 32) was successfully integrated into the GAPDH gene of iPSCs at high efficiencies using the selection systems described herein (see Example 15). FIG. 31 shows the efficiency of the mbIL-15-encoding “cargo” in GAPDH at 0 days post-electroporation in iPSCs transformed with RNPs comprising (RSQ22337) and Cas12a at a concentration of 4 μM and the dsDNA plasmid encoding mbIL-15 at 5 (PLA1632; comprising donor template SEQ ID NO: 45). Genomic DNA was extracted approximately seven days post nucleofection. After genomic DNA extraction ddPCR was performed.

[0867] Two separate populations of the bulk edited mbIL-15 KI iPSC cells were then differentiated into iNK cells and the TI rates were measured using ddPCR at day 28 of the iNK differentiation process. FIG. 33 shows that TI integrate rates for these edited iNK cell populations ranged from 10-15%. While the TI rates in the iNK populations decreased when compared to the TI at day 0 post-electroporation of iPSCs, the TI integration levels within these cell populations remained significant. At day 32 post-differentiation initiation, flow cytometry was conducted to determine the proportion of cells expressing CD56 and exogenous IL-15Rα in these edited iNK cell populations (see FIG. 34A). The CD56 and CD16 co-expression levels were also determined in these edited iNK cell populations (see FIG. 34B). The bulk edited mbIL-15 KI cell populations were also analyzed for markers of differentiation by flow cytometry on day 32, day 39, day 42, and day 49 post-differentiation initiation (see FIG. 34C).

[0868] At day 39 following the initiation of differentiation from the edited iPSCs into iNKs, cells were challenged in 3D spheroid killing assays as described in Example 14 and depicted in FIG. 26. Using this assay, the cytotoxicity of iNKs differentiated from iPSCs comprising knock-in of mbIL-15 at the GAPDH gene was measured (see FIG. 36). Cells were tested in the presence or absence of 5 ng/mL exogenous IL-15. As shown in Table 15 and FIG. 36, mbIL-15 KI iNK cells (Mb IL-15 S1 and Mb IL-15 S2 populations) exhibited more efficient tumor cell killing when compared to unedited parental cells differentiated into iNKs (“WT” PCS, 1 and 2). Of note, mbIL-15 KI iNK cells exhibited better tumor cell killing in the absence of exogenous IL-15 relative to WT iNK cells in the absence of endogenous IL-15 at lower E:T ratios. The mbIL-15 KI iNK cells also exhibited better tumor cell killing in the presence of low concentrations of exogenous IL-15 (5 ng/mL) when compared to unedited WT iNK cells in the presence of the same concentration of exogenous IL-15.

[0869] In addition, mbIL-15 KI iNK cells at later stages of differentiation (day 63 post-differentiation initiation for Set 1 (S1) and day 56 post-differentiation initiation for Set 2 (S2)) were also challenged in 3D spheroid killing assays as described above. Cells were tested in the presence or absence of 10 μg/ml Herceptin and/or 5 ng/mL exogenous IL-15. As shown in Table 16 and FIG. 37A-37D, mbIL-15 KI iNK cells exhibited high tumor cell killing efficiency, particularly when coupled with antibody therapy. At day 63, all mbIL-15 KI iNK cells did not express detectable levels of IL-15Ra; at Day 56, only one mbIL-15 KI iNK cell line (Mb IL-15 S2 R2) expressed detectable levels of IL-15Ra (data not shown).

[0870] The cumulative results of certain 3D spheroid killing assays for mbIL-15 KI iNKs and control WT iNK cells is depicted in FIG. 38. Two independent bulk edited populations of iPSCs (Set 1 (S1) and Set 2 (S2)) comprising mbIL-15 knock-in at the GAPDH gene were differentiated into iNK cells (day 39 and 49 of iPSC differentiation for Set 1, and day 42 of iPSC differentiation for Set 2) These iNK cells significantly reduced tumor cell spheroid size when compared to differentiated WT parental cell iNKs in the absence of exogenous IL-15 (P=0.034, +/−standard deviation, unpaired t-test). The differentiated knock-in mbIL-15 iNK cells also trended towards significant reduction of tumor cell spheroid size when compared to differentiated WT parental cells in the presence of 5 ng/mL exogenous IL-15 (P=0.052, +/−standard deviation, unpaired t-test). These results show that populations of iNK cells comprising mbIL-15 knock-in at the GAPDH locus using the methods described herein perform better in killing tumor cells in the absence of exogenously added IL-15 compared to populations of unedited iNK cells.

TABLE 15
mbIL-15 KI iNK 3D spheroid killing with IL-15

| | EC50 with 0 ng/mL | EC50 with 5 ng/mL |
|---|---|---|
| Cell Line | IL-15 | IL-15 |
| Mb IL-15 S1 | 9.575 | 1.648 |
| Mb-IL-15 S2 | 11.05 | 1.646 |
| WT iNK (PCS) 1 | 20.71 | 4.378 |
| WT iNK (PCS) 2 | 20.99 | 3.213 |

TABLE 16
mbIL-15 KI iNK 3D spheroid killing with Herceptin and/or IL-15

| | | | EC50 with | EC50 with |
|---|---|---|---|---|
| | | | 5 ng/mL | 5 ng/mL |
| | EC50 with | EC50 with | IL-15 and | IL-15 and |
| | 0 μg/mL | 10 μg/mL | 0 μg/mL | 10 μg/mL |
| Cell Line | Herceptin | Herceptin | Herceptin | Herceptin |
| Mb IL-15 Set1 Rep1 | 2.055 | 0.6936 | 0.16515 | 0.1423 |
| Mb IL-15 Set1 Rep2 | 1.701 | 0.5903 | 0.1794 | 0.1247 |
| Mb IL-15 Set1 Rep2.1 | 1.848 | 0.9570 | 0.3187 | 0.1153 |
| Mb IL-15 Set2 Rep1 | 1.291 | 1.589 | 0.2339 | 0.2096 |
| Mb IL-15 Set2 Rep2 | 0.8026 | 0.3783 | 0.3605 | 0.2778 |

[0871] In addition, the mbIL-15 KI iNK cells at later stages of differentiation (day 63 post-differentiation initiation for Set 1 (51) and day 56 post-differentiation initiation for Set 2 (S2)) were also challenged with hematological cancer cells (e.g., Raji cells). Two biological replicate populations of mbIL-15 KI NK cells (S1 and S2) were tested in the presence or absence of 10 μg/ml rituximab. As shown in FIG. 35, mbIL-15 KI iNK cells exhibited high tumor cell killing efficiency, particularly when coupled with antibody therapy. This killing capacity of these cells is significant, as Raji cells are naturally resistant to NK cells, but the mbIL-15 KI iNK cells in combination with antibody were able to find and kill these cells.

### Example 17: Knock-In of Multicistronic CD16, IL-15, and/or IL-15Rα Sequences at a Suitable Essential Gene Loci

[0872] As described above in Example 2, genes of interest (GOI) may be integrated as a cargo sequence into suitable essential gene loci using methods described herein. In certain embodiments, multiple GOIs may be combined into a bicistronic or multicistronic knock-in cargo sequence. FIG. 39A depicts a portion of PLA1829 (comprising donor template SEQ ID NO: 208) comprising a bicistronic knock-in cargo sequence that was utilized for targeted integration at the GAPDH gene comprising an IL-15 peptide sequence, an IL-15Rα peptide sequence, and a GFP peptide sequence (SEQ ID NOs: 187, 189, and 195 respectively). Each of these peptide sequences were separate by a P2A sequence. Depicted in FIG. 39B is a portion of PLA1832 (comprising donor template SEQ ID NO: 209) comprising a multicistronic knock-in cargo sequence that was utilized for targeted integration at the GAPDH gene comprising a CD16 peptide sequence, an IL-15 peptide sequence, and an IL-15Rα peptide sequence (SEQ ID NO: 184, 187, and 189 respectively). Each of these peptide sequences were separate by a P2A sequence. Depicted in FIG. 39C is a portion of PLA1834 (comprising donor template SEQ ID NO: 212) comprising a bicistronic knock-in cargo sequence that was utilized for targeted integration at the GAPDH gene comprising a CD16 peptide sequence, and an mbIL-15 peptide sequence (an IL-15 sequence fused to an IL-15Rα sequence as depicted in FIG. 32) (SEQ ID NOs: 184 and 190 respectively) separated by a P2A sequence.

[0873] The knock-in cargo sequences described in FIG. 39A-39C are comprised within Plasmids 1829, 1832, and 1834 respectively (comprising donor template SEQ ID NO: 208, 209, and 212). PSCs were edited using the exemplary system illustrated in FIGS. 3A, 3B, and 3C, and described in Example 2. In brief, the GAPDH gene was targeted in iPSCs using AsCpf1 (AsCas12a (SEQ ID NO: 62)) and a guide RNA (RSQ22337 (SEQ ID NO: 95)), resulting in a double-strand break towards the 5′ end of the last exon of GAPDH (exon 9). The CRISPR/Cas nuclease and guide RNA were introduced by nucleofection (electroporation) of a ribonucleoprotein (RNP) according to known methods. The cells were also contacted with a double stranded DNA donor template (dsDNA plasmid (PLA1829, PLA1832, or PLA1834 respectively)) that included a donor template (SEQ ID NOs: 208, 209, and 212) comprising in 5′-to-3′ order, a 5′ homology arm approximately 500 bp in length (comprising a 3′ portion of exon 8, intron 8, and a 5′ codon-optimized coding portion of exon 9 optimized to prevent further binding of the gRNA targeting domain sequence of the guide RNA (RSQ22337)), an in-frame sequence encoding the P2A self-cleaving peptide (“P2A”), an in-frame coding sequence as described above (“Cargo”), a stop codon and polyA signal sequence, and a 3′ homology arm approximately 500 bp in length (comprising a coding portion of exon 9 including a stop codon, the 3′ non-coding exonic region of exon 9, and a portion of the downstream intergenic sequence) (as shown in FIG. 3B). Four unique nucleofection events were conducted (corresponding to RNP and PLA1829, RNP and PLA1832, RNP and PLA1834, and RNP with no plasmid control) and cells were plated at clonal density. Colonies were propagated for analysis of TI using ddPCR.

[0874] Following TI, transformed iPSCs (edited clones) with KI of PLA1829, PLA1832 or PLA1834 cargo sequences, or control WT parental cells transformed with RNP alone, were analyzed using flow cytometry seven days after transformation (see FIGS. 40A and 40B). The levels of GFP and IL-15Rα expression were measured in bulk edited iPSC populations. As shown in FIG. 40A, approximately 57% of cells transformed with PLA1829 expressed both IL-15Rα and GFP, while control cells had no GFP expression and approximately 14.4% IL-15Rα expression levels. As shown in FIG. 40B, approximately 33.1% of cells transformed with PLA1832, and approximately 57.2% of cells transformed with PLA1834 expressed IL-15Rα; neither of these cell populations displayed appreciable GFP levels, as expected as the respective donor templates did not comprise GFP. The expression of these cargo proteins can be used as a proxy for determining successful transformation, editing, and/or integration.

[0875] FIG. 41A-41C depicts the genotypes for 24 of the colonies transformed with PLA1829, PLA1832, or PLA1834 (comprising donor template SEQ ID NOs: 208, 209, and 212) respectively and compared to wild-type cells. Measured with ddPCR, cells with ˜85-100% TI are categorized as homozygous, 40-60% are categorized as heterozygous, while those with very low or no signal are categorized as wild type. The colonies were propagated after transformation, and cell populations were then differentiated to iNK cells using a spin embryoid method as known in the art. Shown in FIG. 42A-42D are exemplary flow cytometry results measuring the percentage of cells expressing IL-15Rα and/or CD16, and the median fluorescence intensity (MFI) of IL-15Rα and/or CD16 at day 32 of the iNK differentiation process. As shown in FIG. 42A, transformation with PLA1829, PLA1832, or PLA1834 enabled surface expression of IL-15Rα in heterozygous or homozygous colonies at significantly higher proportions than iNKs differentiated from control WT parental cells. As shown in FIG. 42B, transformation with PLA1832 or PLA1834 enabled surface expression of CD16 in heterozygous or homozygous colonies at significantly higher proportions than iNKs differentiated from control WT parental cells, as cells transformed with the PLA1829 cargo sequence do not comprise a CD16 cargo sequence. As shown in FIG. 42C, transformation with PLA1834 enabled higher MFI of IL-15Rα in heterozygous or homozygous colonies when compared to iNKs differentiated from control WT parental cells, or cells transformed with PLA1829 or PLA1832. As shown in FIG. 42D, transformation with PLA1832 or PLA1834 enabled surface expression of CD16 in heterozygous or homozygous colonies. These data show that the methods described herein can be used to knock-in a multicistronic cargo containing numerous genes of interest into an essential gene such as GAPDH, leading to expression of the genes of interest in the edited cells. These data also clearly demonstrate the constitutive nature of cargo expression from the GAPDH locus.

### Example 18—Computation Screening of AsCpf1 Guide RNAs Suitable for Selection by Essential-Gene Knock-In

[0876] The present example describes a method for computationally screening for AsCpf1 (AsCas12a; e.g., as represented by SEQ ID NO: 62) guide RNAs (gRNAs) suitable for methods described herein that target a number of essential housekeeping genes. The results of this screening are summarized in Table 17, these gRNAs facilitate Cas12a cleavage within the last 500 bp of the DNA coding sequences for the listed essential genes.

[0877] The essential genes in Table 17 selected for this analysis were identified in a pool of essential genes made by combining the essential genes described in Eisenberg et al., (see e.g., Eisenberg and Levanon, Human housekeeping genes, revisited. Trends Genetics, 2014) and the genes described in Yilmaz et al., (see e.g., Yilmaz et al., Defining essential genes for human pluripotent stem cells by CRISPR-Cas9 screening in haploid cells. Nature Cell Biology, 2018). In brief, essential genes described in Yilmaz et al., with CRISPR Scores less than 0, and FDR of <0.05 were combined with essential genes described in Eisenberg & Levanon to create a list of 4,582 genes in total. These genes were then sorted by their average expression level (mean normalized expression across different tissues, see e.g., RNA consensus tissue gene expression data provided by https://www.proteinatlas.org/download/rna_tissue_consensus.tsv.zip), and the 100 genes with the highest average expression levels across tissues were selected for the analysis. GAPDH was present within this group of genes. TBP, E2F4, G6PD and KIF11 were added to this group, making 104 genes in total, for further analysis.

[0878] Potential gRNA target sequences for each of the genes of interest were generated by searching for nuclease specific PAMs with suitable protospacers mapped to a representative coding region (mRNA-201). Transcripts with its name followed by “−201” were selected as the representative for each gene (e.g., GAPDH-201). Gene information (i.e., coding region) was obtained from GENCODE v.37 gene annotation GTF file. Potential gRNAs were first searched within the genomic regions of target genes in the human reference genome (hg38), and those identified gRNAs with their cut sites within 500 bp of the representative coding region's stop site were selected for further analysis. The candidate gRNAs were then aligned to the human reference genome (e.g., hg38) with BWA Aln (maximum mismatch tolerance −n 2). Guides with potential off target binding sites (i.e., aligning to multiple genomic regions; mapping quality MAPQ <30) were filtered out. The resultant gRNAs target highly and/or broadly expressed essential genes within 500 coding base pairs of a representative stop-codon and have no identical off-target binding sites annotated in the human genome. Thus, they are excellent candidate gRNAs for the selection methods described herein.

TABLE 17
AsCas12 guide RNAs

| SEQ | | Target |
|---|---|---|
| ID NO | Gene | Domain Sequence (DNA) |
| 225 | EIF4G2 | AGGCTTTGGCTGGTTCTTTAG |
| 226 | EIF4G2 | GCTGGTTCTTTAGTCAGCTTC |
| 227 | EIF4G2 | GTCAGCTTCTTCCTCTGATTC |
| 228 | EIF4G2 | TAACCAGGTTAGCCACTGATT |
| 229 | EIF4G2 | ACAAAAGACTTACCTGGAACA |
| 230 | EIF4G2 | CCGGAAACTCTTGGGTTATAT |
| 231 | EIF4G2 | CAAGCCAAGAAAGCTTCTTCT |
| 232 | EIF4G2 | CATGTCATAGAAGTGCACAAA |
| 233 | EIF4G2 | GGAAGTTGCTGTTATAGCAGT |
| 234 | EIF4G2 | TGCATTACTGGCTTGAAAGAT |
| 235 | EIF4G2 | CTGCTCTAACTGTTCTTTGGA |
| 236 | EIF4G2 | GAAGGAGCAGAGGATGAATCT |
| 237 | EIF4G2 | ATCGCTGGGGGGGTTTACTTC |
| 238 | EIF4G2 | CTTCACTAGAAATGTACTGTA |
| 239 | EIF4G2 | TCTACATGAAGTTTGGGAGAG |
| 240 | EIF4G2 | GGAGAGATGTTATCTTTAATC |
| 241 | EIF4G2 | TATATGGTTTGAGGGGATGGA |
| 242 | EIF4G2 | AGGGGATGGATCCAACTTTAT |
| 243 | EIF4G2 | TAGGTGAATCAGTGGCTAACC |
| 244 | EIF4G2 | CAAATCTTAATTTATAGGTGA |
| 245 | EIF4G2 | ATTTACAAATCTTAATTTATA |
| 246 | EIF4G2 | CGGGAAAAGGCAAGGCTTTGT |
| 247 | EIF4G2 | TTGGCTTGGAAAGAAGATATA |
| 248 | EIF4G2 | TGCACTTCTATGACATGGAAA |
| 249 | EIF4G2 | AGGCATGTTACTTCGCTTTTT |
| 250 | EIF4G2 | TTCATGATCACGTTGATCTAC |
| 251 | EIF4G2 | AAGCCAGTAATGCAGAAATTT |
| 252 | EIF4G2 | TAGTGAAGTAAACCCCCCCAG |
| 253 | EIF4G2 | TGTCCAGCTTCTTAGAGTACA |
| 254 | EIF4G2 | TGAACATCTTAATGACTAGGT |
| 255 | SKP1 | AAGACCTTACCTTTTTTAATA |
| 256 | SKP1 | CAATGAACTTACCTTCCAACA |
| 257 | SKP1 | AGCAGGGCAGAATAAAAACCA |
| 258 | SKP1 | TTCATAATTTCAGCAGGGCAG |
| 259 | SKP1 | CTTTGTTCATAATTTCAGCAG |
| 260 | SKP1 | CAGGCTGCAAACTACTTAGAC |
| 261 | SKP1 | TTGTTGTAGGTCATTCAGTGG |
| 262 | SKP1 | TTAGATTTGGGAATGGATGAT |
| 263 | SKP1 | TTCTGGTTTTCTTAGATTTGG |
| 264 | SKP1 | GATGCCTTCAATTAAGTTGCA |
| 265 | SKP1 | ATGTCCTTTTTTTTTAGATGC |
| 266 | RPS3 | AAGCTTTATGCTGAAAAGGTG |
| 267 | RPS3 | AAGGGCCTGCTATGGTGTGCT |
| 268 | RPS3 | AAGGAAGCAAGGGATATCCTG |
| 269 | RPS3 | AGCATAAAGCTTTAAAGGAAG |
| 270 | RPS3 | CCAGACACCACAACCTCGCAG |
| 271 | RPS3 | CCAAGCACTCTCAGCTGCTCA |
| 272 | RPS19 | TTCTTCCATCTTTTCCCACAG |
| 273 | RPS19 | CCACAGGTGGCAGCTGCCAAC |
| 274 | RPS19 | TCTGACGTCCCCCATAGATCT |
| 275 | HMGB1 | AGCCCTCTTACCTTCCACCTC |
| 276 | HMGB1 | TGTTCATTTATTGAAGTTCTA |
| 277 | HMGB1 | GTTCGGCCTTCTTCCTCTTCT |
| 278 | HMGB1 | TAGACCATGTCTGCTAAAGAG |
| 279 | HMGB1 | GAAAAATAACTAAACATGGGC |
| 280 | RPL7 | CCCCAAATAGAACCTACCAAG |
| 281 | RPL7 | ACTTCAGGTACCCCAATCTGA |
| 282 | RPL7 | CTTTTTCACTTCAGGTACCCC |
| 283 | RPL7 | TGTTTGCTTTTTCACTTCAGG |
| 284 | RPL7 | ACCACAGTATCAATGGAGTGA |
| 285 | RPL7 | TGGTCCGTTTTCACCACAGTA |
| 286 | RPLP0 | AGGTCAAGGCCTTCTTGGCTG |
| 287 | RPLP0 | ACCACTTCCCCCCTCCTTTCA |
| 288 | G6PD | CTCACCTGCCATAAATATAGG |
| 289 | G6PD | CAGTATGAGGGCACCTACAAG |
| 290 | G6PD | ACCCCACTGCTGCACCAGATT |
| 291 | G6PD | CGCCACGTAGGGGTGCCCTTC |
| 292 | RPL4 | GCTTGTAGTGCCGCTGCTGCA |
| 293 | RPL4 | CCGTGGTGCTCGAAGGGCTCT |
| 294 | RPL4 | TTGCAGCACAAGCTCCGGGTG |
| 295 | RPL4 | TGCCTAATTTGTTGCAGCACA |
| 296 | RPL4 | TAGCAAGAAGATCCATCGCAG |
| 297 | RPL4 | AGTCTTCCCATGCACAAGATG |
| 298 | RPL4 | CCTTTCAGTCTTCCCATGCAC |
| 299 | EEF1G | TCCCCAGCTGAGTCCAGATTG |
| 300 | EEF1G | TTCCTCTTAGTACCTTTGTGT |
| 301 | RPL31 | GATGGCTCCCGCAAAGAAGGG |
| 302 | RPL31 | AATCGTAGGGGCTTCAAGAAG |
| 303 | RPL31 | TTAGGAATGTGCCATACCGAA |
| 304 | RPL31 | CAGATCTACAGACAGTCAATG |
| 305 | RPL31 | GCACCTTATTCCTTTGGCCCA |
| 306 | RPL31 | TGGGATGGAGAACTTACTTTT |
| 307 | RPL31 | ATCTGACGATCAGCGATTAGT |
| 308 | ITM2B | ACTGTCTTTTTCATATTTTAG |
| 309 | ITM2B | ATATTTTAGGACCCAGATGAT |
| 310 | ITM2B | GGACCCAGATGATGTGGTACC |
| 311 | ITM2B | GACTAGCATTTATGCTTGCAG |
| 312 | ITM2B | TGCTTGCAGGTGTTATTCTAG |
| 313 | ITM2B | TGAATGTAGGCTGGAACCTAT |
| 314 | ITM2B | CCTCAGTCCTATCTGATTCAT |
| 315 | ITM2B | TTTATTTATCGACTGTGTCAT |
| 316 | ITM2B | TTTATCGACTGTGTCATGACA |
| 317 | ITM2B | TCGACTGTGTCATGACAAGGA |
| 318 | ITM2B | CCTCTCCAACAGGTATTCAGA |
| 319 | ITM2B | GCAATTCGGCATTTTGAAAAC |
| 320 | ITM2B | AAAACAAATTTGCCGTGGAAA |
| 321 | ITM2B | CCGTGGAAACTTTAATTTGTT |
| 322 | ITM2B | GCCAACTGGTACCACATCATC |
| 323 | ITM2B | TACAAGTATGCTCCTCCTAGA |
| 324 | ITM2B | CACTTACTTGAAGTGCAAAAT |
| 325 | ITM2B | AATGCGATCAGTAATAACCAT |
| 326 | ITM2B | CTTGTCATGACACAGTCGATA |
| 327 | ITM2B | TAAGTTTCCTTGTCATGACAC |
| 328 | ITM2B | TCTGCGTTGCAGTTTGTAAGT |
| 329 | ITM2B | ATAGTTTCTCTGCGTTGCAGT |
| 330 | ITM2B | AAAAGTATTACCTTTAATAGT |
| 331 | ITM2B | ATATTTAAAAAGTATTACCTT |
| 332 | ITM2B | AAAATGCCGAATTGCGAAACA |
| 333 | ITM2B | TTTTCAAAATGCCGAATTGCG |
| 334 | ITM2B | CACGGCAAATTTGTTTTCAAA |
| 335 | ITM2B | TTGACTGTTCAAGAACAAATT |
| 336 | RPL23A | CTTTTCTCCCAGCTCCTGCCC |
| 337 | RPL23A | TCCCAGCTCCTGCCCCTCCTA |
| 338 | RPL23A | CCTCTCCCAGGCTTGACCACT |
| 339 | RPL23A | TTTTTCAGATTGGGATCATCT |
| 340 | RPL23A | TAGGAAGGAAACTTACTTTGT |
| 341 | RPL27A | GTCTGGGCTGCCAACATGGTA |
| 342 | RPL27A | TATTCCTGCAGGCAAGCACCG |
| 343 | RPL27A | TCTGTTCTTCTAGGGCTACTA |
| 344 | PCBP2 | CCCTCTGACTCTCTCCCAGTC |
| 345 | PCBP2 | CTCCTTTTGTAGGCCTATACC |
| 346 | PCBP2 | TAGGCCTATACCATTCAAGGA |
| 347 | PCBP2 | CTCCTTGCAGTTGACCAAGCT |
| 348 | PCBP2 | ACTTGTATCTTAACAGGCATT |
| 349 | PCBP2 | GCAGGTTTGGATGCATCTGCT |
| 350 | PCBP2 | TTTCTCCCTTAAGTTGATTGG |
| 351 | PCBP2 | TCCCTTAAGTTGATTGGCTGC |
| 352 | PCBP2 | TGTGTTACAGGCTTTCCTCGG |
| 353 | PCBP2 | AGCATGAGCCTGAGGGCTTAC |
| 354 | PCBP2 | TTACCTGACCACCTGCAAAGA |
| 355 | PCBP2 | ATCATTAGCCCAATAGCCTTT |
| 356 | HSPA8 | TCTTCCTCAGACTGCTGAGAA |
| 357 | HSPA8 | CTAGGCCGTTTGAGCAAGGAA |
| 358 | HSPA8 | TTTCCTAGGCCGTTTGAGCAA |
| 359 | HNRNPK | ATCAGCACTGAAACCAACCTG |
| 360 | HNRNPK | AGTTGGCTGGATCTATTATTG |
| 361 | HNRNPK | AAAAATCTTTTCAGTTGGCTG |
| 362 | HNRNPK | AATCAGATTATTCCTATGCAG |
| 363 | HNRNPK | TGTTTTTAGGGTGGCTCCGGA |
| 364 | HNRNPK | TTTCTGTTTTTAGGGTGGCTC |
| 365 | HNRNPK | TCTCTAACAGGTTGGTTTCAG |
| 366 | RPL5 | TCTCTTACTATAGATTGCTTA |
| 367 | RPL5 | CATTGGTTTCTTGAATAGCTT |
| 368 | RPL5 | TTGAATAGCTTCTCAATAGGT |
| 369 | UBL5 | TGTAGCTCCAGCTAGGATGAT |
| 370 | UBL5 | CCTTAACTGCTCTGCGCCCAG |
| 371 | UBL5 | TTAGGTACACGATTTTTAAGG |
| 372 | UBL5 | CTTCAGATGAAATCCACGATG |
| 373 | CST3 | GACAAGGTCATTGTGCCCTGC |
| 374 | CST3 | AGATGTGGCTGGTCATGGAAG |
| 375 | CST3 | TTGTACTCGCCGACGGCAAAG |
| 376 | CST3 | CAGATCTACGCTGTGCCTTGG |
| 377 | CST3 | ACAGAAAGCATTCTGCTCTTT |
| 378 | CST3 | CTTTCACAGAAAGCATTCTGC |
| 379 | CST3 | ACATGTGTAGATCGTAGCTGG |
| 380 | CST3 | CCGTCGGCGAGTACAACAAAG |
| 381 | RPS29 | TCACCAAGAGCGAGAACCCTG |
| 382 | RPS29 | TTACAGTCGTGTCTGTTCAAA |
| 383 | RPS10 | TACTGTACATGCTTCCTTTTT |
| 384 | RPS10 | GAAATGACATTATCTGAGAGC |
| 385 | RPS10 | CTCACGTGGCACAGCACTCCG |
| 386 | RPS10 | TGTGGGAACCATACCTTTAGG |
| 387 | RPS10 | TAAAAAGGAAGCATGTACAGT |
| 388 | RPS10 | TCCTATGGCAGGTCCTCATAG |
| 389 | RPS10 | TAGCTGGTGCCGACAAGAAAG |
| 390 | RPS10 | ACTTTCTAGCTGGTGCCGACA |
| 391 | RPS10 | CATAGGTCTGGAGGGTGAGCG |
| 392 | RPS10 | ATTTACATAGGTCTGGAGGGT |
| 393 | RPS10 | TGCCTTACAGTCTCTCAAGTC |
| 394 | RPL6 | TTACGAGTCACAAGTAATAAG |
| 395 | RPL6 | GAAATATGAGATTACGGAGCA |
| 396 | RPL6 | TTTAGAAATATGAGATTACGG |
| 397 | RPL6 | TCTTTATTTAGAAATATGAGA |
| 398 | RPL6 | ATTTTCTCTTTATTTAGAAAT |
| 399 | RPL6 | CCCCTTAGGACCTCTGGTCCT |
| 400 | RPL6 | ACTTACAGAGGGTGGTTTTCC |
| 401 | RPL6 | TTTTTAACTTACAGAGGGTGG |
| 402 | RPLP2 | TGTAGGTATTGGCAAGCTTGC |
| 403 | ARF1 | ACACTGGCTGCCCGGCAGGCC |
| 404 | RPL15 | TGTGTAGGTTACGTTATATAT |
| 405 | RPL15 | CTATTCTAGGAGCGAGCTGGA |
| 406 | RPL15 | CCTCTGCAACGGACTGAAGGC |
| 407 | FAU | CTGGCCGGTCACCTCGAAGGT |
| 408 | FAU | CCTGTAGGCTCATGTAGCCTC |
| 409 | FAU | CTCAGTCGCCAATATGCAGCT |
| 410 | FAU | TTTACTCAGTCGCCAATATGC |
| 411 | RPL36 | CCCCCTAGCGTCTGACCAAAC |
| 412 | RPL36 | CCCCGTACGAGCGGCGCGCCA |
| 413 | NACA | CTAGTATACCTCTTCCTCTTC |
| 414 | NACA | CTCACCTTGGCTTCCCCAAAA |
| 415 | NACA | AAATCTTACCTTCCGTGCCTT |
| 416 | NACA | TCTGTTACAGGAATTAACAAT |
| 417 | NACA | CCTCTCATCTCTCAGGTCGAT |
| 418 | NACA | TACCCTGTAGATCGAAGATTT |
| 419 | NACA | GGCTATGTCCAAACTGGGTCT |
| 420 | NACA | TCTTCTTTAGGCTATGTCCAA |
| 421 | NACA | TCTTCTTAGCTGGCGGCAGCA |
| 422 | PRDX1 | GACATCAGGCTTGATGGTATC |
| 423 | PRDX1 | CCATGCTAGATGACAGAAGTG |
| 424 | PRDX1 | TTAAATTCTTCTGCCCTATCA |
| 425 | PRDX1 | TCTTGCAGTGTGCCCAGCTGG |
| 426 | PRDX1 | TCATTGATGATAAGGGTATTC |
| 427 | PRDX1 | CCAGGGGCCTTTTTATCATTG |
| 428 | PRDX1 | ATCTCTTTTCCCAGGGGCCTT |
| 429 | PRDX1 | CTTTCATCTCTTTTCCCAGGG |
| 430 | PRDX1 | GTATCAGACCCGAAGCGCACC |
| 431 | PRDX1 | CCATAGGGTCAATACACCTAA |
| 432 | PRDX1 | CCTTTTGCCATAGGGTCAATA |
| 433 | PRDX1 | AGTGATAGGGCAGAAGAATTT |
| 434 | PRDX1 | CCCTCTTGACTTCACCTTTGT |
| 435 | PRDX1 | CCCCCAGGAAAATATGTTGTG |
| 436 | ALDOA | CCTTCTCGGTCACATACTGGC |
| 437 | NCL | GCCCAGTCCAAGGTAACTTTA |
| 438 | NCL | TTTCCATCAATTTCACCGTCT |
| 439 | NCL | CATCAATTTCACCGTCTTCCA |
| 440 | NCL | ACCGTCTTCCATGGCCTCCTT |
| 441 | NCL | GCATCCTCCTCACTGTTGAAG |
| 442 | NCL | GAGGACCCAGTTTCCCGGTCA |
| 443 | NCL | CCGGTCAGTAACTATCCTTGC |
| 444 | NCL | ATGTCTCTTCAGTGGTATCCT |
| 445 | NCL | ACAAACAGAGTTTTGGATGGC |
| 446 | NCL | GTGGCAGAGGCCGGGGAGGCT |
| 447 | NCL | GAGGACGAGGTGGTGGTAGAG |
| 448 | NCL | TAGACTTCAACAGTGAGGAGG |
| 449 | NCL | GTTTTGTAGACTTCAACAGTG |
| 450 | NCL | GTGTTCTAGGTTTGGTTTTGT |
| 451 | NCL | ATTTGGTGTTCTAGGTTTGGT |
| 452 | NCL | ACGGCTCCGTTCGGGCAAGGA |
| 453 | NCL | TCAAAGGCCTGTCTGAGGATA |
| 454 | NCL | CTTCCCAGAGCCATCCAAAAC |
| 455 | BTF3 | TAGATGAAAGAAACAATCATG |
| 456 | BTF3 | CTCTTCTCCCTGACTTTAGGG |
| 457 | BTF3 | GGGAACTGCTCGCAGAAAGAA |
| 458 | BTF3 | TTTTCTTAATAGGTGAATATG |
| 459 | BTF3 | TTAATAGGTGAATATGTTTAC |
| 460 | BTF3 | CATTTTCCTTTCATAGCTGTG |
| 461 | BTF3 | CTTTCATAGCTGTGGATGGAA |
| 462 | BTF3 | ATAGCTGTGGATGGAAAAGCA |
| 463 | BTF3 | TACTCTTTTCCTTTTCCTAGA |
| 464 | BTF3 | CTTTTCCTAGATCTTGTGGAG |
| 465 | BTF3 | CTAGATCTTGTGGAGAATTTT |
| 466 | BTF3 | ATACTTGCCTCTTCAATACCA |
| 467 | E2F4 | GGGGCTATCATTGTAGTGAGT |
| 468 | E2F4 | AGCCCATCAAGGCAGACCCCA |
| 469 | E2F4 | AGTTTTGGAACTCCCCAAAGA |
| 470 | E2F4 | GAACTCCCCAAAGAGCTGTCA |
| 471 | E2F4 | CCCCTCTGCTTCGTCTTTCTC |
| 472 | E2F4 | TCCACCCCCGGGAGACCACGA |
| 473 | E2F4 | ATGTGCCTGTTCTCAACCTCT |
| 474 | E2F4 | TGACAGCTCTTTGGGGAGTTC |
| 475 | KIF11 | ACTAAGCTTAATTGCTTTCTG |
| 476 | KIF11 | TGGAACAGGATCTGAAACTGG |
| 477 | KIF11 | TACCCATCAACACTGGTAAGA |
| 478 | KIF11 | TTCTTTTAGGATGTGGATGTA |
| 479 | KIF11 | GGATGTGGATGTAGAAGAGGC |
| 480 | KIF11 | CCGCCTTAAATCCACAGCATA |
| 481 | KIF11 | ATTAAGTTCTAGATTTTGTGC |
| 482 | KIF11 | TGGTTTCATTAAGTTCTAGAT |
| 483 | KIF11 | AGATCCTGTTCCAGAAAGCAA |
| 484 | KIF11 | AAGTACCTGTTGGGATATCCA |
| 485 | KIF11 | TCTTTTAAAGTACCTGTTGGG |
| 486 | KIF11 | AGCTGATCAAGGAGATGTTGA |
| 487 | KIF11 | CTTTTCAGGTGATCAAGGAGA |
| 488 | KIF11 | GCATCATTAACAGCTCAGGCT |
| 489 | KIF11 | TGAACAGTTTAGCATCATTAA |
| 490 | KIF11 | TTGTTTTCTGAACAGTTTAGC |
| 491 | KIF11 | CCGGAATTGTCTCTTCTTTGT |
| 492 | KIF11 | AATTTACCGGAATTGTCTCTT |
| 493 | KIF11 | TCTTTTCCATGTGATTTTTTA |
| 494 | KIF11 | TTTGTCTTTTCCATGTGATTT |
| 495 | KIF11 | GACCTCTCCAGTGTGTTAATG |
| 496 | KIF11 | TTCCACTTTAGACCTCTCCAG |
| 497 | KIF11 | TAACCAAGTGCTCTGTAGTTT |
| 498 | RPL13 | TCTTCTAGGTCTATAAGAAGG |
| 499 | RPL13 | AGTAAGTGTTCACTTACGTTC |
| 500 | PFDN5 | CCTTAATTCTTGCTTCTCAGA |
| 501 | PFDN5 | AGCTGAGCAATGGACGTGGAC |
| 502 | PTMA | AAGGACTTAAAGGAGAAGAAG |
| 503 | PTMA | TGTCGAGGAGAATGAGGAAAA |
| 504 | PTMA | ATTCTCTCCAGGTGAGGAAGA |
| 505 | PTMA | TCTGCTTAGGATGACGATGTC |
| 506 | RPL11 | GCATCCGGAGAAATGAAAAGA |
| 507 | RPL11 | TCCACAGGTGCGGGAGTATGA |
| 508 | RPL11 | AGCATCGCAGACAAGAAGCGC |
| 509 | RPL11 | AGTATGATGGGATCATCCTTC |
| 510 | RPL11 | CGGATGCGAAGTTCCCGCATG |
| 511 | RPL11 | TCCGGATGCCAAAGGATCTGA |
| 512 | RPL11 | ATTTCTCCGGATGCCAAAGGA |
| 513 | RPL11 | GACCCTTCTCCAAGATTTCTT |
| 514 | RPL11 | TTAACTCATACTCCCGCACCT |
| 515 | RPL11 | CCTTCTGCTGGAACCAGCGCA |
| 516 | COX7C | TCTTTTTTTCCAACAGAATTT |
| 517 | COX7C | CAACAGAATTTGCCATTTTGA |
| 518 | RPL8 | TTGAGGCCCTCAGCACTAGTT |
| 519 | RPL8 | CGGCCAGCAGGGGCATCTCTG |
| 520 | RPL8 | TGGGTTACTTACATTCATGGC |
| 521 | RPL8 | TCTGCCTGCAGCCTGTGGAGC |
| 522 | RPL10 | TTCTCCCTACCTAGCCCTGGA |
| 523 | RPL10 | CATTGCTCCTTAGATCCACAT |
| 524 | RPL32 | CCTCCCCAAAAGGAAGAGTTC |
| 525 | TBP | CTGCGGTAATCATGAGGATAA |
| 526 | TBP | AGTTCTGGGAAAATGGTGTGC |
| 527 | TBP | CTTTCCCTAGTGAAGAACAGT |
| 528 | TBP | CCTAGTGAAGAACAGTCCAGA |
| 529 | TBP | CAGCTAAGTTCTTGGACTTCA |
| 530 | TBP | CTATAAGGTTAGAAGGCCTTG |
| 531 | TBP | CAATTTTCCTTCTAGTTATGA |
| 532 | TBP | CTTCTAGTTATGAGCCAGAGT |
| 533 | TBP | CTGGTTTAATCTACAGAATGA |
| 534 | TBP | ATCTACAGAATGATCAAACCC |
| 535 | TBP | TTTCTGGAAAAGTTGTATTAA |
| 536 | TBP | TGGAAAAGTTGTATTAACAGG |
| 537 | TBP | GGTCAAGTTTACAACCAAGAT |
| 538 | TBP | GGGCACGAAGTGCAATGGTCT |
| 539 | TBP | CCAGAACTGAAAATCAGTGCC |
| 540 | TBP | TTACGGCTACCTCTTGGCTCC |
| 541 | TBP | TTGCTGCCAGTCTGGACTGTT |
| 542 | TBP | AGACTTAGCTACTAAATTGTT |
| 543 | TBP | ATCATTCTGTAGATTAAACGA |
| 544 | TBP | CAGAAACAAAAATAAGGAGAA |
| 545 | TBP | AAATGCTTCATAAATTTCTGC |
| 546 | CD63 | CTCAGCCAGCCCCCAATCTTC |
| 547 | CD63 | TCCCAATCTGTGTAGTTAGCA |
| 548 | CD63 | GGGTAATTCTCCATCTGCTGC |
| 549 | CD63 | GGAATTGTCTTTGCCTGCTGC |
| 550 | CD63 | CTTCTAGGTTTTGGGAATTGT |
| 551 | CD63 | TGCCTGCCACCTTCAGGGCTG |
| 552 | CD63 | AACGAGAAGGCGATCCATAAG |
| 553 | CD63 | AGTGCTGTGGGGCTGCTAACT |
| 554 | CD63 | TTCCCTCCCCCAGTTTAAGTG |
| 555 | CD63 | ATAACAACTTCCGGCAGCAGA |
| 556 | CD63 | TGTCTCTTATCATGTTGGTGG |
| 557 | CD63 | CCATCTTTCTGTCTCTTATCA |
| 558 | CD63 | CTCCTGCAGTTTGCCATCTTT |
| 559 | CD63 | TGGGCTGCTGCGGGGCCTGCA |
| 560 | RPS24 | TGTTTTCAGAACGACACCGTA |
| 561 | RPS24 | AGAACGACACCGTAACTATCC |
| 562 | RPS24 | GGTCATTGATGTCCTTCACCC |
| 563 | RPS24 | TCATTCAGCATGGCCTGTATG |
| 564 | RPS24 | CCTCTTCTTCTGGATTACAGA |
| 565 | RPS24 | TAGTGCGGATAGTTACGGTGT |
| 566 | RPS24 | CTTAATGAACTATACCTTTTT |
| 567 | RPS23 | GGGCTGTGCCCAAATGAGCTT |
| 568 | RPS23 | TTCCAGGAAAATGATGAAGTT |
| 569 | RPS23 | TACCCAATGACGGTTGCTTGA |
| 570 | RPS23 | AGAGGAGTTGAAGCCAAACAG |
| 571 | RPS23 | TATTTCAGAGGAGTTGAAGCC |
| 572 | RPS23 | GGCAAGTGTCGTGGACTTCGT |
| 573 | RPS23 | ATTTTTAGGCAAGTGTCGTGG |
| 574 | EEF2 | TCCAGGAAGTTGTCCAGGGCA |
| 575 | EEF2 | AGGCCCTTGCGCTTGCGGGTC |
| 576 | EEF2 | ACCACTGGCAGATCCTGCCCG |
| 577 | EEF2 | TGGTCAAGGCCTATCTGCCCG |
| 578 | EEF2 | AACAGGAAGCGGGGCCACGTG |
| 579 | EEF2 | CCTTCTGGCAGTGTCCAGAGC |
| 580 | EEF2 | TTTCCCTTCTGGCAGTGTCCA |
| 581 | CALR | CTTCTCCCTTCTGCAGGGTGA |
| 582 | CALR | GCGTGCTGGGCCTGGACCTCT |
| 583 | CALR | ACAACTTCCTCATCACCAACG |
| 584 | CALR | GCAACGAGACGTGGGGCGTAA |
| 585 | CALR | TGGGTGGATCCAAGTGCCCTT |
| 586 | CALR | CTCCAAGTCTCACCTGCCAGA |
| 587 | CALR | TTACGCCCCACGTCTCGTTGC |
| 588 | CALR | TCCTTCATTTGTTTCTCTGCT |
| 589 | CALR | TTGTCTTCTTCCTCCTCCTTA |
| 590 | CALR | TCCTCATCATCCTCCTTGTCC |
| 591 | RPL36AL | TATGCCCAGGGAAGGAGGCGC |
| 592 | SRP14 | AGGCTTATTCAAACCTCCTTA |
| 593 | SRP14 | AGGTGAGCTCCAAGGAAGTGA |
| 594 | SRP14 | CTTCTTTTTCAGGTGAGCTCC |
| 595 | SRP14 | CTTCAGATGACGGTCGAACCA |
| 596 | SRP14 | CAGAAGTGCCGGACGTCGGGC |
| 597 | SRP14 | CAGTTCCTGACGGAGCTGACC |
| 598 | GABARAP | TTTCGGATCTTCTCGCCCTCA |
| 599 | GABARAP | GGATCTTCTCGCCCTCAGAGC |
| 600 | GABARAP | TCTACATTGCCTAGAGTGACG |
| 601 | GABARAP | ATCCCAGGAACACCATGAAGA |
| 602 | GABARAP | TGCTTTCATCCCAGGAACACC |
| 603 | GABARAP | TCAACAATGTCATTCCACCCA |
| 604 | GABARAP | TTTGTCAACAATGTCATTCCA |
| 605 | GABARAP | CAGTTGGTCAGTTCTACTTCT |
| 606 | GABARAP | TTGCATCTTGTATCTTTTGCA |
| 607 | GABARAP | TCAGGTGATAGTAGAAAAGGC |
| 608 | GABARAP | ATCTCTTTATCAGGTGATAGT |
| 609 | RPSA | ATAATCTGCCACTCTTGGCAG |
| 610 | RPSA | TAACCCAGATTGAAAAAGAAG |
| 611 | RPSA | GTATTCTCTTAACAGAAGACT |
| 612 | RPSA | GAGAAGCTTACCTCTTCAGGA |
| 613 | SET | AATTATTTATTACAGTATTTT |
| 614 | SET | TTACAGTATTTTGATGAAAAT |
| 615 | SET | GGATTTGACGAAACGTTCGAG |
| 616 | SET | ACGAAACGTTCGAGTCAAACG |
| 617 | SET | AGGTTCCCGATATGGATGATG |
| 618 | SET | TTTCAGGAGGATGAAGGAGAA |
| 619 | SET | AGGAGGATGAAGGAGAAGATG |
| 620 | SET | TTTTACCTCTCCTTCCTCCCC |
| 621 | SET | GCCAAATTTTCTTTTACCTCT |
| 622 | GAPDH | CAGACCACAGTCCATGCCATC |
| 623 | GAPDH | ATCTTCTAGGTATGACAACGA |
| 624 | RPLP1 | TTTGTTGTAGGAGGATAAGAT |
| 625 | RPLP1 | TTGTAGGAGGATAAGATCAAT |
| 626 | RPLP1 | TAGCTGAGGAGAAGAAAGTGG |
| 627 | RPLP1 | CCACCATCACCTTACCTTTGC |
| 628 | RPLP1 | CTACCTGGAGCAGCAGCAGTG |
| 629 | CFL1 | CTCTTAAGGGGCGCAGACTCG |
| 630 | CFL1 | TAGGGATCAAGCATGAATTGC |
| 631 | CFL1 | TTCTTTATAGGGATCAAGCAT |
| 632 | CFL1 | TGTCCAGGGCCCCCGAGTCTG |
| 633 | RPS15 | CTCTTGGTCTCCCGCAGCCCG |
| 634 | TPT1 | CATTATTTATTTTAACCCACT |
| 635 | TPT1 | TTTTAACCCACTTCCTTGTAC |
| 636 | TPT1 | ACCCACTTCCTTGTACTTACA |
| 637 | TPT1 | CCTGGTAGTTTTTGAAATTAG |
| 638 | TPT1 | GAAATGGAAAAATGTGTAAGT |
| 639 | TPT1 | CTTCCCAAGTTCTTTATTGGT |
| 640 | TPT1 | TTTGCTTCCCAAGTTCTTTAT |
| 641 | TPT1 | GAATCAAAGGGAAACTTGAAG |
| 642 | TPT1 | TTAATGCAGATGGTCAGTAGG |
| 643 | RPL23 | CTACCTTTCATCTCGCCTTTA |
| 644 | RPL23 | TTGTTCACTATGACTCCTGCA |
| 645 | RPL23 | CTCACCCTTTTTTCTGAGCTC |
| 646 | RPL23 | ATGCAGGTTCTGCCATTACAG |
| 647 | RPL23 | TTTTTTTAATGCAGGTTCTGC |
| 648 | RPL23 | TTCTCTCAGTACATCCAGCAG |
| 649 | RPL34 | ACTTTCTAGGTCCCGAACCCC |
| 650 | RPL34 | TAGGTCCCGAACCCCTGGTAA |
| 651 | RPL34 | TTATGCAGGTTCGTGCTGTAA |
| 652 | RPL34 | GTATTTTCCTTTCTAGGATCA |
| 653 | RPL34 | CTTTCTAGGATCAAGCGTGCT |
| 654 | RPL34 | TAGGATCAAGCGTGCTTTCCT |
| 655 | RPL34 | AGAAATACTTACAGCCTAGTT |
| 656 | RPL34 | ACTTACCTGTCACGAACACAT |
| 657 | RPL34 | AGCATTTAACTTACCTGTCAC |
| 658 | COX4I1 | TCTTTCAGAATGTTGGCTACC |
| 659 | COX4I1 | AGAATGTTGGCTACCAGGGTA |
| 660 | COX4I1 | CACCTCTGTGTGTGTACGAGC |
| 661 | COX4I1 | TTCAATATGTTTTTCAGAAAG |
| 662 | COX4I1 | AGAAAGTGTTGTGAAGAGCGA |
| 663 | COX4I1 | GCTCCCAGCTTATATGGATCG |
| 664 | COX4I1 | CTGAGATGAACAGGGGCTCGA |
| 665 | COX4I1 | ACCGCGCTCGTTATCATGTGG |
| 666 | COX4I1 | ACAAAGAGTGGGTGGCCAAGC |
| 667 | COX4I1 | TCAAAGCTTTGCGGGAGGGGG |
| 668 | COX4I1 | GTAGTCCCACTTGGAGGCTAA |
| 669 | RPL27 | TCCTTGCTCTCTGCAGAAATG |
| 670 | RPL27 | GAACATTGATGATGGCACCTC |
| 671 | RPL27 | TCCCCAGGTACTCTGTGGATA |
| 672 | RPL27 | CCTTCTAGATACAAGACAGGC |
| 673 | RPL27 | CGTCCGGAGTAGCGTCCAGCC |
| 674 | RPL27 | TCTTTGATCTCTTGGCGATCT |
| 675 | RPL27 | ACAAAAGATTTTATCTTTGAT |
| 676 | EDF1 | GAGGCTTTGTGTTCATTTCGC |
| 677 | EDF1 | TGTTCATTTCGCCCTAGGCCC |
| 678 | EDF1 | GCCCTAGGCCCCTTCTCGATG |
| 679 | EDF1 | CAATGTCCTTTCCCCGGAGCT |
| 680 | EDF1 | CCAAGCACCTGGTTATTGGGT |
| 681 | EDF1 | TTGGAAGTCTCCACATCTTCT |
| 682 | EDF1 | GCCTGGGCGGCCGTAGGGCCC |
| 683 | EDF1 | AGGCCTCAAGCTCCGGGGAAA |
| 684 | EDF1 | GAAAATCAATGAGAAGCCACA |
| 685 | EDF1 | CCTCACACCGACTCCAGGGGC |
| 686 | EDF1 | TAGGCTATCTTAGCGGCACAG |
| 687 | EDF1 | TAATTTTCTAGGCTATCTTAG |
| 688 | TMEM59 | AAAGAAAAATGCTTAAATTTC |
| 689 | TMEM59 | AGAATGAGCAAGATTCACTTT |
| 690 | TMEM59 | TAGGTAGAGGCCCTGCTTCTT |
| 691 | TMEM59 | GATCTAACAACCACAAGAGAA |
| 692 | TMEM59 | GCTTTTGTTCATTCATAAACT |
| 693 | TMEM59 | TTCATTCATAAACTCCAAGTC |
| 694 | TMEM59 | CCTCAGAGGGAACATACTGCT |
| 695 | TMEM59 | TCCATCTTCAAGAAAATTCCT |
| 696 | TMEM59 | CTTAGAGATGATTCTCTCAAA |
| 697 | TMEM59 | TAGGCTCCTGCTCCAAATGTG |
| 698 | TMEM59 | CGTCATCGGCTTGAAGATAAA |
| 699 | TMEM59 | TGAATGAACAAAAGCTAAACA |
| 700 | TMEM59 | CAGAAGCTGAGTATCTATGGT |
| 701 | TMEM59 | TTTTGCAGAAGCTGAGTATCT |
| 702 | TMEM59 | TTGTGCAACTGTTGCTACAGC |
| 703 | TMEM59 | GATTTGTTGTGCAACTGTTGC |
| 704 | TMEM59 | ACTACAACTCTTGTCCTCTCG |
| 705 | TMEM59 | CAGTAACTCTGGGTGGATTTT |
| 706 | TMEM59 | TTGAAGATGGAGAAAGTGATG |
| 707 | TMEM59 | AGCAGATCTGCAAATGAGAAA |
| 708 | TMEM59 | AGAGAATCATCTCTAAGCAAA |
| 709 | TMEM59 | GAGCAGGAGCCTACAAATTTG |
| 710 | TMEM59 | GTCTAAGCCAGAAATCCAGTA |
| 711 | TMEM59 | ATTATTATTTTAGTCTAAGCC |
| 712 | TMEM59 | TCTTCAAGCCGATGACGGAAA |
| 713 | DYNLL1 | TCTTTTCCAGGAATTTGACAA |
| 714 | DYNLL1 | CAGGAATTTGACAAGAAGTAG |
| 715 | DYNLL1 | ATGTGTCACATAACTACCGAA |
| 716 | NME2 | TTTCTTAGGAACATCATTCAT |
| 717 | NME2 | TTAGGAACATCATTCATGGCA |
| 718 | TMBIM6 | GCTGATGGCAACACCTCATAG |
| 719 | TMBIM6 | TGTTTTCTAGGAGTTGGCCTG |
| 720 | TMBIM6 | TAGGAGTTGGCCTGGGCCCTG |
| 721 | TMBIM6 | TATTGCTGTCAACCCCAGGTA |
| 722 | TMBIM6 | TAACAGCATCCTTCCCACTGC |
| 723 | TMBIM6 | ATGGGCACGGCAATGATCTTT |
| 724 | TMBIM6 | CCTGCTTCACCCTCAGTGCAC |
| 725 | TMBIM6 | CTGTGTCTTATAGGTATCTTG |
| 726 | TMBIM6 | TCTTCCCTGGGGAATGTTTTC |
| 727 | TMBIM6 | GATCCATTTGGCTTTTCCAGG |
| 728 | TMBIM6 | TTAGGCAAACCTGTATGTGGG |
| 729 | TMBIM6 | ATACTCAACTCATTATTGAAA |
| 730 | TMBIM6 | AGGCACTGCATTGATCTCTTC |
| 731 | TMBIM6 | ATTACTGTCTTCAGAAAACTC |
| 732 | TMBIM6 | TCCATTTCTAGGATAAGAAGA |
| 733 | TMBIM6 | TAGGATAAGAAGAAAGAGAAG |
| 734 | TMBIM6 | ATGGCTATGAGGTGTTGCCAT |
| 735 | TMBIM6 | TGTTCAGTTTCATGGCTATGA |
| 736 | TMBIM6 | CCAGTTCACACTTACCTCCCA |
| 737 | TMBIM6 | AATAATGAGTTGAGTATCAAA |
| 738 | TMBIM6 | TGAAGACAGTAATGAAATCTA |
| 739 | TMBIM6 | ATTCATGGCCAGGATCATCAT |
| 740 | TMBIM6 | GGTTGTAGGCTAACTAACCTT |
| 741 | RPS7 | TTTAGGAAATTGAAGTTGGTG |
| 742 | RPS7 | GGAAATTGAAGTTGGTGGTGG |
| 743 | RPS7 | CCTTACAGAGGAGAATTCTGC |
| 744 | RPS7 | AACTATTCTTTTAGCCGTACT |
| 745 | RPS7 | GCCGTACTCTGACAGCTGTGC |
| 746 | RPS7 | TTTTCTTGTAGGTTGAAACTT |
| 747 | RPS7 | TTGTAGGTTGAAACTTTTTCT |
| 748 | RPS7 | TGAAACTAGTAAAATACTCAC |
| 749 | ACTB | CTTCCCAGGGCGTGATGGTGG |
| 750 | NPM1 | ATTTGTAGTGATGATGATGAT |
| 751 | NPM1 | TAATTGCAGTCTATACGAGAT |
| 752 | NPM1 | GAAATTCATTTCTTTTTCAGG |
| 753 | NPM1 | TTTTTCAGGGACAAGAATCCT |
| 754 | NPM1 | AGGGACAAGAATCCTTCAAGA |
| 755 | NPM1 | TCTTAATAGGGTGGTTCTCTT |
| 756 | NPM1 | CAGGCTATTCAAGATCTCTGG |
| 757 | NPM1 | TAAAATCATACTTAGTCTTCA |
| 758 | NPM1 | CTCACTTTTTCTATACTTGCT |
| 759 | RPS6 | TTTTTCTTGGTACGCTGCTTC |
| 760 | RPS6 | GGGCCCAGGCGGCGAGGCACT |
| 761 | RPS6 | GGAGGCTAAGGAGAAGCGCCA |
| 762 | RPS6 | TTTAGGAGGCTAAGGAGAAGC |
| 763 | RPS6 | TTTTGTTTAGGAGGCTAAGGA |
| 764 | RPS6 | GGTAAGAAACCTAGGACCAAA |
| 765 | RPS6 | AATTTTTAGGTAAGAAACCTA |
| 766 | RPS6 | TTCTAAGGAGAGAAGGATATT |
| 767 | RPL12 | CTTAAAGGAACCATTAAAGAG |
| 768 | RPL12 | TTTACTTAAAGGAACCATTAA |
| 769 | RPL12 | CTCTTCTGCAGTTAAACACAG |
| 770 | RPL12 | CTGTTTCCTCTTCTGCAGTTA |
| 771 | RPL12 | TAGTCTCCAAAAAAAGTTGGT |
| 772 | RPL12 | TTTCTAGTCTCCAAAAAAAGT |
| 773 | RPL12 | CCCCAGTATACCTGAGGTGCA |
| 774 | CAPNS1 | AACCTGTTACCCACAGACCCT |
| 775 | CAPNS1 | GCATTGACACATGTCGCAGCA |
| 776 | CAPNS1 | AGGAATTCAAGTACTTGTGGA |
| 777 | CAPNS1 | CAGTAGTGAACTCCCAGGTGC |
| 778 | CAPNS1 | ATGTTGTTCCACAAGTACTTG |
| 779 | CAPNS1 | TACACACCTGCCACCTTTTGA |
| 780 | CAPNS1 | AGAGGTTTCTACACACCTGCC |
| 781 | CAPNS1 | ATCTGAGTAGCGTCGGATGAT |
| 782 | CAPNS1 | TCAAGAGATTTGAAGGCACCT |
| 783 | CAPNS1 | TCCAGTGCCATCTTTGTCAAG |
| 784 | RPL3 | CAGGGTGGCTTTGTCCACTAT |
| 785 | RPS13 | TTTATTAGCTTACCTTTCTGT |
| 786 | RPS13 | TTAGCTTACCTTTCTGTTCCT |
| 787 | RPS13 | AGTGAATCATCTACAGCCTCT |
| 788 | RPS13 | TTTTTCAGTGAATCATCTACA |
| 789 | RPS13 | CCCTTTTTTCTTTTTCAGTGA |
| 790 | RPS13 | AGGTGTAATCCTGAGAGATTC |
| 791 | RPS13 | TATTCCATAACAGTGGTTGAA |
| 792 | RPS21 | TCCACAGCTCCGCTAGCAATC |
| 793 | RPS21 | TGACCCTTCTTCTCTTTCTAG |
| 794 | RPS21 | TAGGTTGACAAGGTCACAGGC |
| 795 | RPS21 | TTAAGGGTGAGTCAGATGATT |
| 796 | RPS21 | CCCTGGTTCTAGGAACTTTTG |
| 797 | RPS21 | AGACGATGCCATCGGCCTTGG |
| 798 | SERF2 | ATTTTCTTTCCTTAGGCGGTA |
| 799 | SERF2 | TTTCCTTAGGCGGTAACCAGC |
| 800 | SERF2 | CTTAGGCGGTAACCAGCGTGA |
| 801 | SERF2 | TGCTGCCGCCCGCAAGCAGAG |
| 802 | SERF2 | ATATTCTTCTGGCGGGCGAGC |
| 803 | SERF2 | CCTTAACCGAGTCGCTCTGCT |
| 804 | SERF2 | CCTCCCCTCCCTGGGGCTACC |
| 805 | RPL7A | TTTCCCCTCCTGCCTTTTAGG |
| 806 | RPL7A | CCCTCCTGCCTTTTAGGGAAG |
| 807 | RPL7A | GGGAAGACAAAGGCGCTTTGG |
| 808 | RPL7A | TCTTTTCAGATCCGCCGTCAC |
| 809 | RPL7A | AGATCCGCCGTCACTGGGGTG |
| 810 | RPL7A | GGGCCAGGCTGTGTACTTACG |
| 811 | RPL7A | GTGTAAAGCTGCCTCTTACCT |
| 812 | HNRNPA2B1 | TAAATTACCTCCACCATATGG |
| 813 | HNRNPA2B1 | CACTCTTCATTGGACCGTAGT |
| 814 | HNRNPA2B1 | CAAAATCATTGTAATTTCCAC |
| 815 | HNRNPA2B1 | TTACCTCCTCCATAGTTGTCA |
| 816 | HNRNPA2B1 | CACCGCCACCACGTGAATCCC |
| 817 | HNRNPA2B1 | GTGGTAGCAGGAACATGGGGG |
| 818 | HNRNPA2B1 | GAAATTATAACCAGCAACCTT |
| 819 | HNRNPA2B1 | ATAGGAAATTATGGAAGTGGA |
| 820 | HNRNPA2B1 | GAGGTAGCCCCGGTTATGGAG |
| 821 | HNRNPA2B1 | TAATAGGTGGCAATTTTGGAG |
| 822 | HNRNPA2B1 | GGGATGGCTATAATGGGTATG |
| 823 | HNRNPA2B1 | GCCCCTAACAGATGGATATGG |
| 824 | HNRNPA2B1 | GGACCAGGACCAGGAAGTAAC |
| 825 | HNRNPA2B1 | GGGATTCACGTGGTGGCGGTG |
| 826 | HNRNPA2B1 | GCTTTGGGGATTCACGTGGTG |
| 827 | HNRNPA2B1 | TTGTAGGCAACTTTGGCTTTG |
| 828 | HNRNPA2B1 | TCTAGACAAGAAATGCAGGAA |
| 829 | RPL13A | TCTAACAGAAAAAGCGGATGG |
| 830 | RPL13A | GCATAGCTCACCTTGTCGTAG |
| 831 | ENO1 | AGCAGGAGGCAGTTGCAGGAC |
| 832 | ENO1 | TCCTTCCCAAGAATTGAAGAG |
| 833 | ENO1 | CCTTTCTCCTTCCCAAGAATT |
| 834 | ENO1 | TCCTAGATCAAGACTGGTGCC |
| 835 | ENO1 | TTTTCTCCTAGATCAAGACTG |
| 836 | ENO1 | CTTAGTGGTGTCTATCGAAGA |
| 837 | PPIA | CTATATGTTGACAGGGTGGTG |
| 838 | PPIA | AAGGTTGGATGGCAAGCATGT |
| 839 | CD81 | CCTGTGAGGTGGCCGCCGGCA |
| 840 | CD81 | ACCACCTCAGTGCTCAAGAAC |
| 841 | CD81 | TGTCCCTCGGGCAGCAACATC |
| 842 | RPL35 | TTGACAATGCGCCCCTCAGGC |
| 843 | RPL35 | TAGCCGAGTCGTCCGGAAATC |
| 844 | DAD1 | TTCTGTGGGTTGATCTGTATT |
| 845 | DAD1 | CCAGCACCATCCTGCACCTTG |
| 846 | DAD1 | TCTTTGCCAGCACCATCCTGC |
| 847 | DAD1 | CTGATTTTCTCTTTGCCAGCA |
| 848 | DAD1 | CAAGGCATCTCCCCAGAGCGA |
| 849 | DAD1 | CCTGAGAATACAGATCAACCC |
| 850 | DAD1 | CTTCTTGTGCAGTTTGCCTGA |
| 851 | DAD1 | TGTTTTGCTTCTTGTGCAGTT |
| 852 | DAD1 | TCTCGGGCTTCATCTCTTGTG |
| 853 | DAD1 | GCGGTTCTTAGAAGAGTACTT |
| 854 | UBA52 | TGAAGACCCTCACTGGCAAAA |
| 855 | UBA52 | CCAGTGAGGGTCTTCACAAAG |
| 856 | UBA52 | TGGGCAAGCTGGCGGAGAGAA |
| 857 | UBA52 | ACCTTCTTCTTGGGACGCAGG |
| 858 | RPL30 | TAGGTGAAAAGGTTTACTTTT |
| 859 | RPL30 | TGATTTAAAAAGCATACCTGG |
| 860 | RPL30 | AAAAGCATACCTGGATCAATG |
| 861 | RPL30 | GGTGACTCTGACATCATTAGA |
| 862 | RPL30 | TTTTTTAGGTGACTCTGACAT |
| 863 | RPL30 | TTTTTATTTTTTAGGTGACTC |
| 864 | RPL30 | GTTCCCAAAGGAAATCTGAAA |
| 865 | RPL30 | CCCATTTTGGTTCCCAAAGGA |
| 866 | RPL30 | TAGAAAAAGTCGCTGGAGTCG |
| 867 | RPL30 | CTTTGTAGAAAAAGTCGCTGG |
| 868 | RPL30 | ATGTTTGCTTTGTAGAAAAAG |
| 869 | RNASEK | CGCCTGCCGCCCCCGGATGGG |
| 870 | RNASEK | TCCCACCGCTTTCCGAGCCCG |
| 871 | RNASEK | CGAGCCCGCTTGCACCTCGGC |
| 872 | RNASEK | TGGCGTCGCTCCTGTGCTGTG |
| 873 | RPL38 | TGTTGCAGCCTCGGAAAATTG |
| 874 | RPL38 | TCTCTTTCCCTCTAGGTTTGG |
| 875 | RPL38 | CCTCTAGGTTTGGCAGTGAAG |
| 876 | RPL38 | GTCGGGCTGTGAGCAGGAAGT |
| 877 | MYL12B | TTCTTTCTATTGTCTTCCAGG |
| 878 | MYL12B | TATTGTCTTCCAGGCACCATT |
| 879 | MYL12B | GCTAAAGTTCTTTCAGTCATC |
| 880 | PFN1 | CCCATCAGCAGGACTAGCGCT |
| 881 | PFN1 | CTCCTCCTCCAGCGCTAGTCC |
| 882 | PFN1 | TCTTTCCTCCTCCTCCAGCGC |
| 883 | PFN1 | GCATGGATCTTCGTACCAAGA |
| 884 | RPS11 | TCCTCATAATCTGTAGACTGA |
| 885 | RPS11 | TCTTTCCTATCCTTTCAGGCT |
| 886 | RPS11 | CTATCCTTTCAGGCTATTGAG |
| 887 | RPS11 | AGGCTATTGAGGGCACCTACA |
| 888 | RPS11 | TTCTGAGGTTCCCCGCACCTC |

### Example 19—Computation Screening of Guide RNAs for Selection by Essential-Gene Knock-In

[0879] The present example describes a method for computationally screening for gRNAs more likely to be suitable for use in targeting essential genes using the selection methods herein that are relevant for different RNA-guided nucleases and variants thereof (e.g., variants of Cas12a, such as Mad7), so long as the RNA-guided nucleases exhibit high cutting efficiency. Cas12b, Cas12e, Cas-Phi, Mad7, and SpyCas9 gRNAs targeting essential genes described preceding examples (GAPDH, TBP, E2F4, G6PD, and KIF11) were selected for this analysis, but a similar process could be applied to identify gRNAs for these RNA-guided nucleases in other essential genes as well. The results of this screening are summarized in tables 18-22, these gRNAs facilitate DNA cleavage within the last 500 bp of the coding sequences of the listed essential genes.

[0880] Potential target sequences for each of the essential genes in this analysis (GAPDH, TBP, E2F4, G6PD, and KIF11) were generated by searching for nuclease specific PAMs (ATTN, TTCN, TTN, TTN, and NGG for Cas12b, Cas12e, CasΦ, Mad7, and SpyCas9 respectively) with suitable protospacers mapped to a representative coding region (mRNA-201). Transcripts with its name followed by “−201” were selected as the representative for each gene (e.g., GAPDH-201). Gene information (i.e., coding region) was obtained from GENCODE v.37 gene annotation GTF file. Potential gRNAs were first searched within the genomic regions of target genes in the human reference genome (hg38), and those identified gRNAs with their cut sites within 500 bp of the representative coding region stop site were selected for further analysis. The candidate gRNAs were then aligned to the human reference genome (e.g., hg38) with BWA Aln (maximum mismatch tolerance −n 2). Guides with potential off target binding sites (i.e., aligning to multiple genomic regions; mapping quality MAPQ <30) were filtered out. The resultant gRNAs target essential genes within 500 coding base pairs of a representative stop-codon and have no identical off-target binding sites annotated in the human genome. Thus, gRNAs in Tables 18-22, corresponding to SEQ ID NOs: 889-1885, represent excellent candidate gRNAs for applying the selection methods described herein to GAPDH, TBP, E2F4, G6PD, and

TABLE 18
Cas12b guide RNAs

| SEQ | | Target Domain |
|---|---|---|
| ID NO | Gene | Sequence (DNA) |
| 889 | GAPDH | CCCAGCTCTCATACCATGAGTCC |
| 890 | TBP | TATCCACAGTGAATCTTGGTTGT |
| 891 | TBP | CACTTCGTGCCCGAAACGCCGAA |
| 892 | TBP | TCTCTGACCATTGTAGCGGTTTG |
| 893 | TBP | TAGCGGTTTGCTGCGGTAATCAT |
| 894 | TBP | TCAGTTCTGGGAAAATGGTGTGC |
| 895 | TBP | AGAATATGGTGGGGAGCTGTGAT |
| 896 | TBP | TCCTTCTAGTTATGAGCCAGAGT |
| 897 | TBP | CCTGGTTTAATCTACAGAATGAT |
| 898 | TBP | TTCTCCTTATTTTTGTTTCTGGA |
| 899 | TBP | TTGTTTCTGGAAAAGTTGTATTA |
| 900 | TBP | ATGAAGCATTTGAAAACATCTAG |
| 901 | TBP | TAAAGGGATTCAGGAAGACGACG |
| 902 | TBP | GGCGTTTCGGGCACGAAGTGCAA |
| 903 | TBP | TATTCGGCGTTTCGGGCACGAAG |
| 904 | TBP | AAATAGATCTAACCTTGGGATTA |
| 905 | TBP | TCCCAGAACTGAAAATCAGTGCC |
| 906 | TBP | CTTACGGCTACCTCTTGGCTCCT |
| 907 | TBP | TCTTGCTGCCAGTCTGGACTGTT |
| 908 | TBP | TGAATCTTGAAGTCCAAGAACTT |
| 909 | TBP | TTGGTGGGTGAGCACAAGGCCTT |
| 910 | TBP | CAGACTTAGCTAGTAAATTGTTG |
| 911 | TBP | AACCAGGAAATAACTCTGGCTCA |
| 912 | TBP | TGTAGATTAAACGAGGAAATAAC |
| 913 | TBP | TGGGTTTGATCATTCTGTAGATT |
| 914 | TBP | CTGCTCTGACTTTAGCACCTAAG |
| 915 | TBP | CGTCGTCTTCCTGAATCCCTTTA |
| 916 | E2F4 | TAGTGAGTGGCGGCCCTGGGACT |
| 917 | E2F4 | CCAGAGTGCATGAGCTCGGAGCT |
| 918 | E2F4 | TATCTAGAACCTGGACGAGAGTG |
| 919 | E2F4 | CCTGGACTTCTGCACTGCCAGGG |
| 920 | E2F4 | CTGACAGCTCTTTGGGGAGTTCC |
| 921 | G6PD | AGCTGGAGAAGCCCAAGCCCATC |
| 922 | G6PD | TCACCCCACTGCTGCACCAGATT |
| 923 | KIF11 | ATGAAGATAAATTGATAGCACAA |
| 924 | KIF11 | ATAGCACAAAATCTAGAACTTAA |
| 925 | KIF11 | GTTTGACTAAGCTTAATTGCTTT |
| 926 | KIF11 | CTTTCTGGAACAGGATCTGAAAC |
| 927 | KIF11 | ATACCCATCAACACTGGTAAGAA |
| 928 | KIF11 | TTCATCAATTGGCGGGGTTCCAT |
| 929 | KIF11 | GCGGGGTTCCATTTTTCCAGGTA |
| 930 | KIF11 | TCCCGCCTTAAATCCACAGCATA |
| 931 | KIF11 | ACACACTGGAGAGGTCTAAAGTG |
| 932 | KIF11 | CCTCTGCGAGCCCAGATCAACCT |
| 933 | KIF11 | AGTTCTAGATTTTGTGCTATCAA |
| 934 | KIF11 | TTATGGTTTCATTAAGTTCTAGA |
| 935 | KIF11 | AGCTTAGTCAAACCAATTTTTAT |
| 936 | KIF11 | CTCTTTTAAAGTACCTGTTGGGA |
| 937 | KIF11 | TATTTCTCTTTTAAAGTACCTGT |
| 938 | KIF11 | ACAGCTCAGGCTGTTTCCTTTTC |
| 939 | KIF11 | TCTCTTCTTTGTTGTTTTCTGAA |
| 940 | KIF11 | ACCGGAATTGTCTCTTCTTTGTT |
| 941 | KIF11 | ATGAACAATCCACACCAGCATCT |
| 942 | KIF11 | AAGGTTGATCTGGGCTCGCAGAG |
| 943 | KIF11 | CCAACCCCCAAGTGAATTAAAGG |
| — | — | — |

TABLE 19
Cas12e guide RNAs

| | SEQ | | Target Domain |
|---|---|---|---|
| | ID NO | Gene | Sequence (DNA) |
| | 944 | GAPDH | TCTTCTAGGTATGAGAACGAA |
| | 945 | GAPDH | CGAGCTCTCATACCATGAGTC |
| | 946 | TBP | TGCCCGAAACGCCGAATATAA |
| | 947 | TBP | CTCTGACCATTGTAGCGGTTT |
| | 948 | TBP | GTTCTGGGAAAATGGTGTGCA |
| | 949 | TBP | GGGAAAATGGTGTGCACAGGA |
| | 950 | TBP | TTTCCCTAGTGAAGAACAGTC |
| | 951 | TBP | CTAGTGAAGAACAGTCCAGAC |
| | 952 | TBP | AGCTAAGTTCTTGGACTTCAA |
| | 953 | TBP | TGGACTTCAAGATTCAGAATA |
| | 954 | TBP | AGATTCAGAATATGGTGGGGA |
| | 955 | TBP | GAATATGGTGGGGAGCTGTGA |
| | 956 | TBP | TATAAGGTTAGAAGGCCTTGT |
| | 957 | TBP | TTCTAGTTATGAGCCAGAGTT |
| | 958 | TBP | AGTTATGAGCCAGAGTTATTT |
| | 959 | TBP | TGGTTTAATCTACAGAATGAT |
| | 960 | TBP | CCTTATTTTTGTTTCTGGAAA |
| | 961 | TBP | GGAAAAGTTGTATTAACAGGT |
| | 962 | TBP | TAGGTGCTAAAGTCAGAGCAG |
| | 963 | TBP | AAAGGGATTCAGGAAGACGAC |
| | 964 | TBP | GGCACGAAGTGCAATGGTCTT |
| | 965 | TBP | GCGTTTCGGGCACGAAGTGCA |
| | 966 | TBP | TGGCTCTCTTATCCTCATGAT |
| | 967 | TBP | CAGAACTGAAAATCAGTGCCG |
| | 968 | TBP | TACGGCTACCTCTTGGCTCCT |
| | 969 | TBP | TGCTGCCAGTCTGGACTGTTC |
| | 970 | TBP | GTACAACTCTAGCATATTTTC |
| | 971 | TBP | GAATCTTGAAGTCCAAGAACT |
| | 972 | TBP | CATCACAGCTCCCCACCATAT |
| | 973 | TBP | AACCTTATAGGAAACTTCACA |
| | 974 | TBP | GACTTACCTACTAAATTGTTG |
| | 975 | TBP | GTAGATTAAACCAGGAAATAA |
| | 976 | TBP | GGGTTTGATCATTCTGTAGAT |
| | 977 | TBP | AGAAACAAAAATAAGGAGAAC |
| | 978 | TBP | TGTTACAACTTACCTGTTAAT |
| | 979 | TBP | GCTCTGACTTTAGCACCTAAG |
| | 980 | TBP | TAAATTTCTGCTCTGACTTTA |
| | 981 | TBP | AATGCTTCATAAATTTCTGCT |
| | 982 | TBP | TGAATCCCTTTAGAATAGGGT |
| | 983 | E2F4 | CTCCCACTGGGCCCAACAACA |
| | 984 | E2F4 | GCCCTGCTGGACAGCAGCAGC |
| | 985 | E2F4 | TCCGGACCCAACCCTTCTACC |
| | 986 | E2F4 | ACCTCCTTTGAGCCCATCAAG |
| | 987 | E2F4 | TGTTTTTCAGTTTTGGAACTC |
| | 988 | E2F4 | GTTTTGGAACTCCCCAAAGAG |
| | 989 | E2F4 | CAGAGTGCATGAGCTCGGAGC |
| | 990 | E2F4 | TCTTTCTCCACCCCCGGGAGA |
| | 991 | E2F4 | CCACCCCCGGGAGACCACGAT |
| | 992 | E2F4 | GCACTGCCAGGGACAGCAGTG |
| | 993 | E2F4 | CTGGACTTCTGCACTGCCAGG |
| | 994 | E2F4 | GACAGCTCTTTGGGGAGTTCC |
| | 995 | E2F4 | GAGGACATCAACTCCTCCAGC |
| | 996 | E2F4 | AGGGCCACCCACCTTCTGAGG |
| | 997 | E2F4 | CTCTCGTCCAGGTTGTAGATA |
| | 998 | G6PD | CCCACTTGTAGGTGCCCTCAT |
| | 999 | G6PD | TCAGCTCGTCTGCCTCCGTGG |
| | 1000 | G6PD | TCACCTGCCATAAATATAGGG |
| | 1001 | G6PD | CCAGCTCAATCTGGTGCAGCA |
| | 1002 | G6PD | CTGTAGGGCACCTTGTATCTG |
| | 1003 | G6PD | TGGTCATCATCTTGGTGTACA |
| | 1004 | G6PD | GGGCCTTGCCGCAGCGCAGGA |
| | 1005 | G6PD | AGTATGAGGGCACCTACAAGT |
| | 1006 | G6PD | CCCCACTGCTGCACCAGATTG |
| | 1007 | G6PD | GCGGGAGCCAGATGCACTTCG |
| | 1008 | G6PD | ACCCCGAGGAGTCGGAGCTGG |
| | 1009 | G6PD | TCAACCCCGAGGAGTCGGAGC |
| | 1010 | G6PD | ACCAGCAGTGCAAGCGCAACG |
| | 1011 | G6PD | ATGATGTGGCCGGCGACATCT |
| | 1012 | G6PD | TCCTGCGCTGCGGCAAGGCCC |
| | 1013 | G6PD | GCCACGTAGGGGTGCCCTTCA |
| | 1014 | KIF11 | GGAACAGGATCTGAAACTGGA |
| | 1015 | KIF11 | GAAAACAACAAAGAAGAGACA |
| | 1016 | KIF11 | TCTTTTAGGATGTGGATGTAG |
| | 1017 | KIF11 | TTTAGGATGTGGATGTAGAAG |
| | 1018 | KIF11 | GGGGCAGTATACTGAAGAACC |
| | 1019 | KIF11 | TCAATTGGCGGGGTTCCATTT |
| | 1020 | KIF11 | CGCCTTAAATCCACAGCATAA |
| | 1021 | KIF11 | AGATTTTGTGCTATCAATTTA |
| | 1022 | KIF11 | TTAAGTTCTAGATTTTGTGCT |
| | 1023 | KIF11 | AGAAAGCAATTAAGCTTAGTC |
| | 1024 | KIF11 | GATCCTGTTCCAGAAAGCAAT |
| | 1025 | KIF11 | CTTTTAAAGTACCTGTTGGGA |
| | 1026 | KIF11 | ATTTCTCTTTTAAAGTACCTG |
| | 1027 | KIF11 | TCTGTGGTGTCGTACCTTTAA |
| | 1028 | KIF11 | TACCAGTGTTGATGGGTATAA |
| | 1029 | KIF11 | GTTCTTACCAGTGTTGATGGG |
| | 1030 | KIF11 | CGTGGTTCAGTTCTTACCAGT |
| | 1031 | KIF11 | GCTGATCAAGGAGATGTTCAC |
| | 1032 | KIF11 | TTTTCAGCTGATCAAGGAGAT |
| | 1033 | KIF11 | GAACAGTTTAGCATCATTAAC |
| | 1034 | KIF11 | TTGTTGTTTTCTGAACAGTTT |
| | 1035 | KIF11 | GTATACTGCCCCAGAACTGCC |
| | 1036 | KIF11 | TCAGTATACTGCCCCAGAACT |
| | 1037 | KIF11 | ATGTGATTTTTTATGCTGTGG |
| | 1038 | KIF11 | TTGTCTTTTCCATGTGATTTT |
| | 1039 | KIF11 | ACTTTAGACCTCTCCAGTGTG |
| | 1040 | KIF11 | TCCACTTTAGACCTCTCCAGT |
| — | — | — | |

TABLE 20
Cas-Phi guide RNAs

| SEQ | | Target Domain |
|---|---|---|
| ID NO | Gene | Sequence (DNA) |
| 1041 | GAPDH | TGCAGACCACAGTCCATGCCA |
| 1042 | GAPDH | GCAGACCACAGTCCATGCCAT |
| 1043 | GAPDH | CAGACCACAGTCCATGCCATC |
| 1044 | GAPDH | TCATCTTCTAGGTATGACAAC |
| 1045 | GAPDH | CATCTTCTAGGTATGACAACG |
| 1046 | GAPDH | ATCTTCTAGGTATGACAACGA |
| 1047 | GAPDH | TAGGTATGACAACGAATTTGG |
| 1048 | GAPDH | CCCAGCTCTCATACCATGAGT |
| 1049 | TBP | TATCCACAGTGAATCTTGGTT |
| 1050 | TBP | GTTGTAAACTTGACCTAAAGA |
| 1051 | TBP | TAAACTTGACCTAAAGACCAT |
| 1052 | TBP | ACCTAAAGACCATTGCACTTC |
| 1053 | TBP | CACTTCGTGCCCGAAACGCCG |
| 1054 | TBP | GTGCCCGAAACGCCGAATATA |
| 1055 | TBP | TCTCTGACCATTGTAGCGGTT |
| 1056 | TBP | TAGCGGTTTGCTGCGGTAATC |
| 1057 | TBP | GCTGCGGTAATCATGAGGATA |
| 1058 | TBP | CTGCGGTAATCATGAGGATAA |
| 1059 | TBP | TCAGTTCTGGGAAAATGGTGT |
| 1060 | TBP | CAGTTCTGGGAAAATGGTGTG |
| 1061 | TBP | AGTTCTGGGAAAATGGTGTGC |
| 1062 | TBP | TGGGAAAATGGTGTGCACAGG |
| 1063 | TBP | TTTCCTTTCCCTAGTGAAGAA |
| 1064 | TBP | TTCCTTTCCCTAGTGAAGAAC |
| 1065 | TBP | TCCTTTCCCTAGTGAAGAACA |
| 1066 | TBP | CCTTTCCCTAGTGAAGAACAG |
| 1067 | TBP | CTTTCCCTAGTGAAGAACAGT |
| 1068 | TBP | CCCTAGTGAAGAACAGTCCAG |
| 1069 | TBP | CCTAGTGAAGAACAGTCCAGA |
| 1070 | TBP | TACAGAAGTTGGGTTTTCCAG |
| 1071 | TBP | GGTTTTCCAGCTAAGTTCTTG |
| 1072 | TBP | TCCAGCTAAGTTCTTGGACTT |
| 1073 | TBP | CCAGCTAAGTTCTTGGACTTC |
| 1074 | TBP | CAGCTAAGTTCTTGGACTTCA |
| 1075 | TBP | TTGGACTTCAAGATTCAGAAT |
| 1076 | TBP | GAGTTCAAGATTCAGAATATG |
| 1077 | TBP | AAGATTCAGAATATGGTGGGG |
| 1078 | TBP | AGAATATGGTGGGGAGCTGTG |
| 1079 | TBP | CCTATAAGGTTAGAAGGCCTT |
| 1080 | TBP | CTATAAGGTTAGAAGGCCTTG |
| 1081 | TBP | TGCTCACCCACCAACAATTTA |
| 1082 | TBP | TTGCAATTTTCCTTCTAGTTA |
| 1083 | TBP | TGCAATTTTCCTTCTAGTTAT |
| 1084 | TBP | GCAATTTTCCTTCTAGTTATG |
| 1085 | TBP | CAATTTTCCTTCTAGTTATGA |
| 1086 | TBP | TCCTTCTAGTTATGAGCCAGA |
| 1087 | TBP | CCTTCTAGTTATGAGCCAGAG |
| 1088 | TBP | CTTCTAGTTATGAGCCAGAGT |
| 1089 | TBP | TAGTTATGAGCCAGAGTTATT |
| 1090 | TBP | TGAGCCAGAGTTATTTCCTGG |
| 1091 | TBP | CCTGGTTTAATCTACAGAATG |
| 1092 | TBP | CTGGTTTAATCTACAGAATGA |
| 1093 | TBP | AATCTACAGAATGATCAAACC |
| 1094 | TBP | ATCTACAGAATGATCAAACCC |
| 1095 | TBP | TTCTCCTTATTTTTGTTTCTG |
| 1096 | TBP | TCCTTATTTTTGTTTCTGGAA |
| 1097 | TBP | TTTTTGTTTCTGGAAAAGTTG |
| 1098 | TBP | TTGTTTCTGGAAAAGTTGTAT |
| 1099 | TBP | TGTTTCTGGAAAAGTTGTATT |
| 1100 | TBP | GTTTCTGGAAAAGTTGTATTA |
| 1101 | TBP | TTTCTGGAAAAGTTGTATTAA |
| 1102 | TBP | CTGGAAAAGTTGTATTAACAG |
| 1103 | TBP | TGGAAAAGTTGTATTAACAGG |
| 1104 | TBP | TCTTCTTAGGTGCTAAAGTCA |
| 1105 | TBP | TTAGGTGCTAAAGTCAGAGCA |
| 1106 | TBP | GGTGCTAAAGTCAGAGCAGAA |
| 1107 | TBP | TAAAGGGATTCAGGAAGACGA |
| 1108 | TBP | GGTCAAGTTTAGAACCAAGAT |
| 1109 | TBP | AGGTCAAGTTTACAACCAAGA |
| 1110 | TBP | GGGCACGAAGTGCAATGGTCT |
| 1111 | TBP | CGGGCACGAAGTGCAATGGTC |
| 1112 | TBP | GGCGTTTCGGGCACGAAGTGC |
| 1113 | TBP | TATTCGGCGTTTCGGGCACGA |
| 1114 | TBP | GGATTATATTCGGCGTTTCGG |
| 1115 | TBP | AAATAGATCTAACCTTGGGAT |
| 1116 | TBP | TCCTCATGATTACCGCAGCAA |
| 1117 | TBP | GTGGCTCTCTTATCCTCATGA |
| 1118 | TBP | CCAGAACTGAAAATCAGTGCC |
| 1119 | TBP | CCCAGAACTGAAAATCAGTGC |
| 1120 | TBP | TCCCAGAACTGAAAATCAGTG |
| 1121 | TBP | GCTCCTGTGCACACCATTTTC |
| 1122 | TBP | CGGCTACCTCTTGGCTCCTGT |
| 1123 | TBP | TTACGGCTACCTCTTGGCTCC |
| 1124 | TBP | CTTACGGCTACCTCTTGGCTC |
| 1125 | TBP | CTGCCAGTCTGGACTGTTCTT |
| 1126 | TBP | TTGCTGCCAGTCTGGACTGTT |
| 1127 | TBP | CTTGCTGCCAGTCTGGACTGT |
| 1128 | TBP | TCTTGCTGCCAGTCTGGACTG |
| 1129 | TBP | TGTACAACTCTAGCATATTTT |
| 1130 | TBP | GCTGGAAAACCCAACTTCTGT |
| 1131 | TBP | AAGTCCAAGAACTTAGCTGGA |
| 1132 | TBP | TGAATCTTGAAGTCCAAGAAC |
| 1133 | TBP | ACATCACAGCTCCCCACCATA |
| 1134 | TBP | TAACCTTATAGGAAACTTCAC |
| 1135 | TBP | GTGGGTGAGCACAAGGCCTTC |
| 1136 | TBP | TTGGTGGGTGAGCACAAGGCC |
| 1137 | TBP | CCTACTAAATTGTTGGTGGGT |
| 1138 | TBP | AGACTTAGCTAGTAAATTGTT |
| 1139 | TBP | CAGACTTAGCTAGTAAATTGT |
| 1140 | TBP | AACCAGGAAATAACTCTGGCT |
| 1141 | TBP | TGTAGATTAAACCAGGAAATA |
| 1142 | TBP | ATCATTCTGTAGATTAAACCA |
| 1143 | TBP | GATCATTCTGTAGATTAAACC |
| 1144 | TBP | TGGGTTTGATCATTCTGTAGA |
| 1145 | TBP | CAGAAACAAAAATAAGGAGAA |
| 1146 | TBP | CCAGAAACAAAAATAAGGAGA |
| 1147 | TBP | TCCAGAAACAAAAATAAGGAG |
| 1148 | TBP | ATACAACTTTTCCAGAAACAA |
| 1149 | TBP | CCTGTTAATACAACTTTTCCA |
| 1150 | TBP | CAACTTACCTGTTAATACAAC |
| 1151 | TBP | CTGTTACAACTTACCTGTTAA |
| 1152 | TBP | TGCTCTGACTTTAGCACCTAA |
| 1153 | TBP | CTGCTCTGACTTTAGCACCTA |
| 1154 | TBP | ATAAATTTCTGCTCTGACTTT |
| 1155 | TBP | AAATGCTTCATAAATTTCTGC |
| 1156 | TBP | CAAATGCTTCATAAATTTCTG |
| 1157 | TBP | TCAAATGCTTCATAAATTTCT |
| 1158 | TBP | CTGAATCCCTTTAGAATAGGG |
| 1159 | TBP | CGTCGTCTTCCTGAATCCCTT |
| 1160 | E2F4 | GGGGGCTATCATTGTAGTGAG |
| 1161 | E2F4 | GGGGCTATCATTGTAGTGAGT |
| 1162 | E2F4 | TAGTGAGTGGCGGCCCTGGGA |
| 1163 | E2F4 | ACTCCCACTGGGCCCAACAAC |
| 1164 | E2F4 | TGCCCTGCTGGACAGCAGCAG |
| 1165 | E2F4 | GTCCGGACCCAACCCTTCTAC |
| 1166 | E2F4 | TACCTCCTTTGAGCCCATCAA |
| 1167 | E2F4 | GAGCCCATCAAGGCAGACCCC |
| 1168 | E2F4 | AGCCCATCAAGGCAGACCCCA |
| 1169 | E2F4 | CTTGTTTTTCAGTTTTGGAAC |
| 1170 | E2F4 | TTTTTCAGTTTTGGAACTCCC |
| 1171 | E2F4 | TTCAGTTTTGGAACTCCCCAA |
| 1172 | E2F4 | TCAGTTTTGGAACTCCCCAAA |
| 1173 | E2F4 | CAGTTTTGGAACTCCCCAAAG |
| 1174 | E2F4 | AGTTTTGGAACTCCCCAAAGA |
| 1175 | E2F4 | TGGAACTCCCCAAAGAGCTGT |
| 1176 | E2F4 | GGAACTCCCCAAAGAGCTGTC |
| 1177 | E2F4 | CCAGAGTGCATGAGCTCGGAG |
| 1178 | E2F4 | GCCCCTCTGCTTCGTCTTTCT |
| 1179 | E2F4 | CCCCTCTGCTTCGTCTTTCTC |
| 1180 | E2F4 | GTCTTTCTCCACCCCCGGGAG |
| 1181 | E2F4 | CTCCACCCCCGGGAGACCACG |
| 1182 | E2F4 | TCCACCCCCGGGAGACCACGA |
| 1183 | E2F4 | TATCTACAACCTGGAGGAGAG |
| 1184 | E2F4 | GATGTGCCTGTTCTCAACCTC |
| 1185 | E2F4 | ATGTGCCTGTTCTCAACCTCT |
| 1186 | E2F4 | TGCACTGCCAGGGACAGCAGT |
| 1187 | E2F4 | CCTGGACTTCTGCACTGCCAG |
| 1188 | E2F4 | CTATCAGTCCCAGGGCCGCCA |
| 1189 | E2F4 | GGCCCAGTGGGAGTGAACTGA |
| 1190 | E2F4 | TTGGGCCCAGTGGGAGTGAAC |
| 1191 | E2F4 | GGTCCGGACGAACTGCTGCTG |
| 1192 | E2F4 | ATGGGCTCAAAGGAGGTAGAA |
| 1193 | E2F4 | TGACAGCTCTTTGGGGAGTTC |
| 1194 | E2F4 | CTGACAGCTCTTTGGGGAGTT |
| 1195 | E2F4 | TGAGGACATCAACTCCTCCAG |
| 1196 | E2F4 | CAGGGCCACCCACCTTCTGAG |
| 1197 | E2F4 | TAGATATAATCGTGGTCTCCC |
| 1198 | E2F4 | ACTCTCGTCCAGGTTGTAGAT |
| 1199 | G6PD | TGGGGGTTCACCCACTTGTAG |
| 1200 | G6PD | ACCCACTTGTAGGTGCCCTCA |
| 1201 | G6PD | TAGGTGCCCTCATACTGGAAA |
| 1202 | G6PD | ATCAGCTCGTCTGCCTCCGTG |
| 1203 | G6PD | CCTCACCTGCCATAAATATAG |
| 1204 | G6PD | CTCACCTGCCATAAATATAGG |
| 1205 | G6PD | GGCTTCTCCAGCTCAATCTGG |
| 1206 | G6PD | TCCAGCTCAATCTGGTGCAGC |
| 1207 | G6PD | TCTGTAGGGCACCTTGTATCT |
| 1208 | G6PD | TATCTGTTGCCGTAGGTCAGG |
| 1209 | G6PD | CCGTAGGTCAGGTCCAGCTCC |
| 1210 | G6PD | AAGAACATGCCCGGCTTCTTG |
| 1211 | G6PD | TTGGTCATCATCTTGGTGTAC |
| 1212 | G6PD | GTCATCATCTTGGTGTACACG |
| 1213 | G6PD | GTGTACACGGCCTCGTTGGGC |
| 1214 | G6PD | GGCTGCACGCGGATCACCAGC |
| 1215 | G6PD | CGCTTGCACTGCTGGTGGAAG |
| 1216 | G6PD | CACTGCTGGTGGAAGATGTCG |
| 1217 | G6PD | CGCTCGTTCAGGGCCTTGCCG |
| 1218 | G6PD | AGGGCCTTGCCGCAGCGCAGG |
| 1219 | G6PD | CCGCAGCGCAGGATGAAGGGC |
| 1220 | G6PD | CAGTATGAGGGCACCTACAAG |
| 1221 | G6PD | CCAGTATGAGGGCACCTACAA |
| 1222 | G6PD | AGCTGGAGAAGCCCAAGCCCA |
| 1223 | G6PD | ACCCCACTGCTGCACCAGATT |
| 1224 | G6PD | CACCCCACTGCTGCACCAGAT |
| 1225 | G6PD | TCACCCCACTGCTGCACCAGA |
| 1226 | G6PD | TGCGGGAGCCAGATGCACTTC |
| 1227 | G6PD | AACCCCGAGGAGTCGGAGCTG |
| 1228 | G6PD | TTCAACCCCGAGGAGTCGGAG |
| 1229 | G6PD | CACCAGCAGTGCAAGCGCAAC |
| 1230 | G6PD | CATGATGTGGCCGGCGACATC |
| 1231 | G6PD | ATCCTGCGCTGCGGCAAGGCC |
| 1232 | G6PD | CGCCACGTAGGGGTGCCCTTC |
| 1233 | G6PD | CCGCCACGTAGGGGTGCCCTT |
| 1234 | KIF11 | ATGAAGATAAATTGATAGCAC |
| 1235 | KIF11 | ATAGCACAAAATCTAGAACTT |
| 1236 | KIF11 | ATGAAACCATAAAAATTGGTT |
| 1237 | KIF11 | GTTTGACTAAGCTTAATTGCT |
| 1238 | KIF11 | GACTAAGCTTAATTGCTTTCT |
| 1239 | KIF11 | ACTAAGCTTAATTGCTTTCTG |
| 1240 | KIF11 | ATTGCTTTCTGGAACAGGATC |
| 1241 | KIF11 | CTTTCTGGAACAGGATCTGAA |
| 1242 | KIF11 | CTGGAACAGGATCTGAAACTG |
| 1243 | KIF11 | TGGAACAGGATCTGAAACTGG |
| 1244 | KIF11 | TCTAATGTCCGTTAAAGGTAC |
| 1245 | KIF11 | AAGGTACGACACCACAGAGGA |
| 1246 | KIF11 | TTTATACCCATCAACACTGGT |
| 1247 | KIF11 | ATACCCATCAACACTGGTAAG |
| 1248 | KIF11 | TACCCATCAACACTGGTAAGA |
| 1249 | KIF11 | ATCAGCTGAAAAGGAAACAGC |
| 1250 | KIF11 | ATGATGCTAAACTGTTCAGAA |
| 1251 | KIF11 | AGAAAACAACAAAGAAGAGAC |
| 1252 | KIF11 | CTTCTTTTAGGATGTGGATGT |
| 1253 | KIF11 | TTCTTTTAGGATGTGGATGTA |
| 1254 | KIF11 | TTTTAGGATGTGGATGTAGAA |
| 1255 | KIF11 | TAGGATGTGGATGTAGAAGAG |
| 1256 | KIF11 | AGGATGTGGATGTAGAAGAGG |
| 1257 | KIF11 | GGATGTGGATGTAGAAGAGGC |
| 1258 | KIF11 | TGGGGCAGTATACTGAAGAAC |
| 1259 | KIF11 | TTCATCAATTGGCGGGGTTCC |
| 1260 | KIF11 | ATCAATTGGCGGGGTTCCATT |
| 1261 | KIF11 | GCGGGGTTCCATTTTTCCAGG |
| 1262 | KIF11 | TCCCGCCTTAAATCCACAGCA |
| 1263 | KIF11 | CCCGCCTTAAATCCACAGCAT |
| 1264 | KIF11 | CCGCCTTAAATCCACAGCATA |
| 1265 | KIF11 | AATCCACAGCATAAAAAATCA |
| 1266 | KIF11 | ACACACTGGAGAGGTCTAAAG |
| 1267 | KIF11 | GTTACAAAGAGCAGATTACCT |
| 1268 | KIF11 | CAAAGAGCAGATTACCTCTGC |
| 1269 | KIF11 | CCTCTGCGAGCCCAGATCAAC |
| 1270 | KIF11 | TAGATTTTGTGCTATCAATTT |
| 1271 | KIF11 | AGTTCTAGATTTTGTGCTATC |
| 1272 | KIF11 | ATTAAGTTCTAGATTTTGTGC |
| 1273 | KIF11 | CATTAAGTTCTAGATTTTGTG |
| 1274 | KIF11 | TGGTTTCATTAAGTTCTAGAT |
| 1275 | KIF11 | ATGGTTTCATTAAGTTCTAGA |
| 1276 | KIF11 | TATGGTTTCATTAAGTTCTAG |
| 1277 | KIF11 | TTATGGTTTCATTAAGTTCTA |
| 1278 | KIF11 | GTCAAACCAATTTTTATGGTT |
| 1279 | KIF11 | AGCTTAGTCAAACCAATTTTT |
| 1280 | KIF11 | CAGAAAGCAATTAAGCTTAGT |
| 1281 | KIF11 | AGATCCTGTTCCAGAAAGCAA |
| 1282 | KIF11 | CAGATCCTGTTCCAGAAAGCA |
| 1283 | KIF11 | GGATATCCAGTTTCAGATCCT |
| 1284 | KIF11 | AAGTACCTGTTGGGATATCCA |
| 1285 | KIF11 | AAAGTACCTGTTGGGATATCC |
| 1286 | KIF11 | TAAAGTACCTGTTGGGATATC |
| 1287 | KIF11 | TCTTTTAAAGTACCTGTTGGG |
| 1288 | KIF11 | CTCTTTTAAAGTACCTGTTGG |
| 1289 | KIF11 | TATTTCTCTTTTAAAGTACCT |
| 1290 | KIF11 | CTCTGTGGTGTCGTACCTTTA |
| 1291 | KIF11 | CCTCTGTGGTGTCGTACCTTT |
| 1292 | KIF11 | TCCTCTGTGGTGTCGTACCTT |
| 1293 | KIF11 | ATGGGTATAAATAACTTTTCC |
| 1294 | KIF11 | CCAGTGTTGATGGGTATAAAT |
| 1295 | KIF11 | TTACCAGTGTTGATGGGTATA |
| 1296 | KIF11 | AGTTCTTACCAGTGTTGATGG |
| 1297 | KIF11 | ACGTGGTTCAGTTCTTACCAG |
| 1298 | KIF11 | AGCTGATCAAGGAGATGTTCA |
| 1299 | KIF11 | CAGCTGATCAAGGAGATGTTC |
| 1300 | KIF11 | TCAGCTGATCAAGGAGATGTT |
| 1301 | KIF11 | CTTTTCAGCTGATCAAGGAGA |
| 1302 | KIF11 | CCTTTTCAGCTGATCAAGGAG |
| 1303 | KIF11 | ACAGCTCAGGCTGTTTCCTTT |
| 1304 | KIF11 | GCATCATTAACAGCTCAGGCT |
| 1305 | KIF11 | AGCATCATTAACAGCTCAGGC |
| 1306 | KIF11 | TGAACAGTTTAGCATCATTAA |
| 1307 | KIF11 | CTGAACAGTTTAGCATCATTA |
| 1308 | KIF11 | TCTGAACAGTTTAGCATCATT |
| 1309 | KIF11 | TTTTCTGAACAGTTTAGCATC |
| 1310 | KIF11 | TTGTTTTCTGAACAGTTTAGC |
| 1311 | KIF11 | TTTGTTGTTTTCTGAACAGTT |
| 1312 | KIF11 | TCTCTTCTTTGTTGTTTTCTG |
| 1313 | KIF11 | CCGGAATTGTCTCTTCTTTGT |
| 1314 | KIF11 | ACCGGAATTGTCTCTTCTTTG |
| 1315 | KIF11 | AATTTACCGGAATTGTCTCTT |
| 1316 | KIF11 | AAATTTACCGGAATTGTCTCT |
| 1317 | KIF11 | AGTATACTGCCCCAGAACTGC |
| 1318 | KIF11 | TTCAGTATACTGCCCCAGAAC |
| 1319 | KIF11 | GAGGTTCTTCAGTATACTGCC |
| 1320 | KIF11 | ACTTAGAGGTTCTTCAGTATA |
| 1321 | KIF11 | ATGAACAATCCACACCAGCAT |
| 1322 | KIF11 | TCTGATATGACATACCTGGAA |
| 1323 | KIF11 | CATGTGATTTTTTATGCTGTG |
| 1324 | KIF11 | CCATGTGATTTTTTATGCTGT |
| 1325 | KIF11 | TCCATGTGATTTTTTATGCTG |
| 1326 | KIF11 | TCTTTTCCATGTGATTTTTTA |
| 1327 | KIF11 | GTCTTTTCCATGTGATTTTTT |
| 1328 | KIF11 | TTTGTCTTTTCCATGTGATTT |
| 1329 | KIF11 | CTTTGTCTTTTCCATGTGATT |
| 1330 | KIF11 | TCTTTGTCTTTTCCATGTGAT |
| 1331 | KIF11 | ATGCCTCTGTTTTCTTTGTCT |
| 1332 | KIF11 | GACCTCTCCAGTGTGTTAATG |
| 1333 | KIF11 | AGACCTCTCCAGTGTGTTAAT |
| 1334 | KIF11 | CACTTTAGACCTCTCCAGTGT |
| 1335 | KIF11 | TTCCACTTTAGACCTCTCCAG |
| 1336 | KIF11 | CTTCCACTTTAGACCTCTCCA |
| 1337 | KIF11 | TAACCAAGTGCTCTGTAGTTT |
| 1338 | KIF11 | GTAACCAAGTGCTCTGTAGTT |
| 1339 | KIF11 | ATCTGGGCTCGCAGAGGTAAT |
| 1340 | KIF11 | AAGGTTGATCTGGGCTCGCAG |
| 1341 | KIF11 | CCAACCCCCAAGTGAATTAAA |
| — | — | — |

TABLE 21
Mad7 guide RNAs

| SEQ | | Target Domain |
|---|---|---|
| ID NO | Gene | Sequence (DNA) |
| 1342 | GAPDH | TGCAGACCACAGTCCATGCCA |
| 1343 | GAPDH | GCAGACCACAGTCCATGCCAT |
| 1344 | GAPDH | CAGACCACAGTCCATGCCATC |
| 1345 | GAPDH | TCATCTTCTAGGTATGACAAC |
| 1346 | GAPDH | CATCTTCTAGGTATGACAACG |
| 1347 | GAPDH | ATCTTCTAGGTATGACAACGA |
| 1348 | GAPDH | TAGGTATGACAACGAATTTGG |
| 1349 | GAPDH | CCCAGCTCTCATACCATGAGT |
| 1350 | TBP | TATCCACAGTGAATCTTGGTT |
| 1351 | TBP | GTTGTAAACTTGACCTAAAGA |
| 1352 | TBP | TAAACTTGACCTAAAGACCAT |
| 1353 | TBP | ACCTAAAGACCATTGCACTTC |
| 1354 | TBP | CACTTCGTGCCCGAAACGCCG |
| 1355 | TBP | GTGCCCGAAACGCCGAATATA |
| 1356 | TBP | TCTCTGACCATTGTAGCGGTT |
| 1357 | TBP | TAGCGGTTTGCTGCGGTAATC |
| 1358 | TBP | GCTGCGGTAATCATGAGGATA |
| 1359 | TBP | CTGCGGTAATCATGAGGATAA |
| 1360 | TBP | TCAGTTCTGGGAAAATGGTGT |
| 1361 | TBP | CAGTTCTGGGAAAATGGTGTG |
| 1362 | TBP | AGTTCTGGGAAAATGGTGTGC |
| 1363 | TBP | TGGGAAAATGGTGTGCACAGG |
| 1364 | TBP | TTTCCTTTCCCTAGTGAAGAA |
| 1365 | TBP | TTCCTTTCCCTAGTGAAGAAC |
| 1366 | TBP | TCCTTTCCCTAGTGAAGAACA |
| 1367 | TBP | CCTTTCCCTAGTGAAGAACAG |
| 1368 | TBP | CTTTCCCTAGTGAAGAACAGT |
| 1369 | TBP | CCCTAGTGAAGAACAGTCGAG |
| 1370 | TBP | CCTAGTGAAGAACAGTCCAGA |
| 1371 | TBP | TACAGAAGTTGGGTTTTCCAG |
| 1372 | TBP | GGTTTTCCAGCTAAGTTCTTG |
| 1373 | TBP | TCCAGCTAAGTTCTTGGACTT |
| 1374 | TBP | CCAGCTAAGTTCTTGGACTTC |
| 1375 | TBP | CAGCTAAGTTCTTGGACTTCA |
| 1376 | TBP | TTGGACTTCAAGATTCAGAAT |
| 1377 | TBP | GACTTCAAGATTCAGAATATG |
| 1378 | TBP | AAGATTCAGAATATGGTGGGG |
| 1379 | TBP | AGAATATGGTGGGGAGCTGTG |
| 1380 | TBP | CCTATAAGGTTAGAAGGCCTT |
| 1381 | TBP | CTATAAGGTTAGAAGGCCTTG |
| 1382 | TBP | TGCTCACCCACCAACAATTTA |
| 1383 | TBP | TTGCAATTTTCCTTCTAGTTA |
| 1384 | TBP | TGCAATTTTCCTTCTAGTTAT |
| 1385 | TBP | GCAATTTTCCTTCTAGTTATG |
| 1386 | TBP | CAATTTTCCTTCTAGTTATGA |
| 1387 | TBP | TCCTTCTAGTTATGAGCCAGA |
| 1388 | TBP | CCTTCTAGTTATGAGCCAGAG |
| 1389 | TBP | CTTCTAGTTATGAGCCAGAGT |
| 1390 | TBP | TAGTTATGAGCCAGAGTTATT |
| 1391 | TBP | TGAGCCAGAGTTATTTCCTGG |
| 1392 | TBP | CCTGGTTTAATCTACAGAATG |
| 1393 | TBP | CTGGTTTAATCTACAGAATGA |
| 1394 | TBP | AATCTACAGAATGATCAAACC |
| 1395 | TBP | ATCTACAGAATGATCAAACCC |
| 1396 | TBP | TTCTCCTTATTTTTGTTTCTG |
| 1397 | TBP | TCCTTATTTTTGTTTCTGGAA |
| 1398 | TBP | TTTTTGTTTCTGGAAAAGTTG |
| 1399 | TBP | TTGTTTCTGGAAAAGTTGTAT |
| 1400 | TBP | TGTTTCTGGAAAAGTTGTATT |
| 1401 | TBP | GTTTCTGGAAAAGTTGTATTA |
| 1402 | TBP | TTTCTGGAAAAGTTGTATTAA |
| 1403 | TBP | CTGGAAAAGTTGTATTAACAG |
| 1404 | TBP | TGGAAAAGTTGTATTAACAGG |
| 1405 | TBP | TCTTCTTAGGTGCTAAAGTCA |
| 1406 | TBP | TTAGGTGCTAAAGTCAGAGCA |
| 1407 | TBP | GGTGCTAAAGTCAGAGCAGAA |
| 1408 | TBP | TAAAGGGATTCAGGAAGACGA |
| 1409 | TBP | GGTCAAGTTTACAACCAAGAT |
| 1410 | TBP | AGGTCAAGTTTACAACCAAGA |
| 1411 | TBP | GGGCACGAAGTGCAATGGTCT |
| 1412 | TBP | CGGGCACGAAGTGCAATGGTC |
| 1413 | TBP | GGCGTTTCGGGCACGAAGTGC |
| 1414 | TBP | TATTCGGCGTTTCGGGCACGA |
| 1415 | TBP | GGATTATATTCGGCGTTTCGG |
| 1416 | TBP | AAATAGATCTAACCTTGGGAT |
| 1417 | TBP | TCCTCATGATTACCGCAGCAA |
| 1418 | TBP | GTGGCTCTCTTATCCTCATGA |
| 1419 | TBP | CCAGAACTGAAAATCAGTGCC |
| 1420 | TBP | CCCAGAACTGAAAATCAGTGC |
| 1421 | TBP | TCCCAGAACTGAAAATGAGTG |
| 1422 | TBP | GCTCCTGTGCACACCATTTTC |
| 1423 | TBP | CGGCTACCTCTTGGCTCCTGT |
| 1424 | TBP | TTACGGCTACCTCTTGGCTCC |
| 1425 | TBP | CTTACGGCTACCTCTTGGCTC |
| 1426 | TBP | CTGCCAGTCTGGACTGTTCTT |
| 1427 | TBP | TTGCTGCCAGTCTGGACTGTT |
| 1428 | TBP | CTTGCTGCCAGTCTGGACTGT |
| 1429 | TBP | TCTTGCTGCCAGTCTGGACTG |
| 1430 | TBP | TGTAGAACTCTAGCATATTTT |
| 1431 | TBP | GCTGGAAAACCCAACTTCTGT |
| 1432 | TBP | AAGTCCAAGAACTTAGCTGGA |
| 1433 | TBP | TGAATCTTGAAGTCCAAGAAC |
| 1434 | TBP | ACATCACAGCTCCCCACCATA |
| 1435 | TBP | TAACCTTATAGGAAACTTCAC |
| 1436 | TBP | GTGGGTGAGCACAAGGCCTTC |
| 1437 | TBP | TTGGTGGGTGAGCACAAGGCC |
| 1438 | TBP | CCTACTAAATTGTTGGTGGGT |
| 1439 | TBP | AGACTTAGCTAGTAAATTGTT |
| 1440 | TBP | CAGACTTAGCTAGTAAATTGT |
| 1441 | TBP | AACCAGGAAATAACTCTGGCT |
| 1442 | TBP | TGTAGATTAAACCAGGAAATA |
| 1443 | TBP | ATCATTCTGTAGATTAAACCA |
| 1444 | TBP | GATCATTCTGTAGATTAAACC |
| 1445 | TBP | TGGGTTTGATCATTCTGTAGA |
| 1446 | TBP | CAGAAACAAAAATAAGGAGAA |
| 1447 | TBP | CCAGAAACAAAAATAAGGAGA |
| 1448 | TBP | TCCAGAAACAAAAATAAGGAG |
| 1449 | TBP | ATACAACTTTTCCAGAAACAA |
| 1450 | TBP | CCTGTTAATACAACTTTTCCA |
| 1451 | TBP | CAACTTACCTGTTAATACAAC |
| 1452 | TBP | CTGTTACAACTTACCTGTTAA |
| 1453 | TBP | ATAAATTTCTGCTCTGACTTT |
| 1454 | TBP | AAATGCTTCATAAATTTCTGC |
| 1455 | TBP | CAAATGCTTCATAAATTTCTG |
| 1456 | TBP | TCAAATGCTTCATAAATTTCT |
| 1457 | TBP | CTGAATCCCTTTAGAATAGGG |
| 1458 | TBP | CGTCGTCTTCCTGAATCCCTT |
| 1459 | E2F4 | GGGGGCTATCATTGTAGTGAG |
| 1460 | E2F4 | GGGGCTATCATTGTAGTGAGT |
| 1461 | E2F4 | TAGTGAGTGGCGGCCCTGGGA |
| 1462 | E2F4 | ACTCCCACTGGGCCCAACAAC |
| 1463 | E2F4 | TGCCCTGCTGGACAGCAGCAG |
| 1464 | E2F4 | GTCCGGACCCAACCCTTCTAC |
| 1465 | E2F4 | TACCTCCTTTGAGCCCATCAA |
| 1466 | E2F4 | GAGCCCATCAAGGCAGACCCC |
| 1467 | E2F4 | AGCCCATCAAGGCAGACCCCA |
| 1468 | E2F4 | CTTGTTTTTCAGTTTTGGAAC |
| 1469 | E2F4 | TTTTTCAGTTTTGGAACTCCC |
| 1470 | E2F4 | TTCAGTTTTGGAACTCCCCAA |
| 1471 | E2F4 | TCAGTTTTGGAACTCCCCAAA |
| 1472 | E2F4 | CAGTTTTGGAACTCCCCAAAG |
| 1473 | E2F4 | AGTTTTGGAACTCCCCAAAGA |
| 1474 | E2F4 | TGGAACTCCCCAAAGAGCTGT |
| 1475 | E2F4 | GGAACTCCCCAAAGAGCTGTC |
| 1476 | E2F4 | CCAGAGTGCATGAGCTCGGAG |
| 1477 | E2F4 | GCCCCTCTGCTTCGTCTTTCT |
| 1478 | E2F4 | CCCCTCTGCTTCGTCTTTCTC |
| 1479 | E2F4 | GTCTTTCTCCACCCCCGGGAG |
| 1480 | E2F4 | CTCCACCCCCGGGAGACCACG |
| 1481 | E2F4 | TCCACCCCCGGGAGACCACGA |
| 1482 | E2F4 | TATCTACAACCTGGAGGAGAG |
| 1483 | E2F4 | GATGTGCCTGTTCTCAACCTC |
| 1484 | E2F4 | ATGTGCCTGTTCTCAACCTCT |
| 1485 | E2F4 | TGCACTGCCAGGGACAGCAGT |
| 1486 | E2F4 | CCTGGACTTCTGCACTGCCAG |
| 1487 | E2F4 | CTATCAGTCCCAGGGCCGCCA |
| 1488 | E2F4 | GGCCCAGTGGGAGTGAACTGA |
| 1489 | E2F4 | TTGGGCCCAGTGGGAGTGAAC |
| 1490 | E2F4 | GGTCCGGACGAACTGCTGCTG |
| 1491 | E2F4 | ATGGGCTCAAAGGAGGTAGAA |
| 1492 | E2F4 | TGACAGCTCTTTGGGGAGTTC |
| 1493 | E2F4 | CTGACAGCTCTTTGGGGAGTT |
| 1494 | E2F4 | TGAGGACATCAACTCCTCCAG |
| 1495 | E2F4 | CAGGGCCACCCACCTTCTGAG |
| 1496 | E2F4 | TAGATATAATCGTGGTCTCCC |
| 1497 | E2F4 | ACTCTCGTCCAGGTTGTAGAT |
| 1498 | G6PD | TGGGGGTTCACCCACTTGTAG |
| 1499 | G6PD | ACCCACTTGTAGGTGCCCTCA |
| 1500 | G6PD | TAGGTGCCCTCATACTGGAAA |
| 1501 | G6PD | ATCAGCTCGTCTGCCTCCGTG |
| 1502 | G6PD | CCTCACCTGCCATAAATATAG |
| 1503 | G6PD | CTCACCTGCCATAAATATAGG |
| 1504 | G6PD | GGCTTCTCCAGCTCAATCTGG |
| 1505 | G6PD | TCCAGCTCAATCTGGTGCAGC |
| 1506 | G6PD | TCTGTAGGGCACCTTGTATCT |
| 1507 | G6PD | TATCTGTTGCCGTAGGTCAGG |
| 1508 | G6PD | CCGTAGGTCAGGTCCAGCTCC |
| 1509 | G6PD | AAGAACATGCCCGGCTTCTTG |
| 1510 | G6PD | TTGGTCATCATCTTGGTGTAC |
| 1511 | G6PD | GTCATCATCTTGGTGTACACG |
| 1512 | G6PD | GTGTACACGGCCTCGTTGGGC |
| 1513 | G6PD | GGCTGCACGCGGATCACCAGC |
| 1514 | G6PD | CGCTTGCACTGCTGGTGGAAG |
| 1515 | G6PD | CACTGCTGGTGGAAGATGTCG |
| 1516 | G6PD | CGCTCGTTCAGGGCCTTGCCG |
| 1517 | G6PD | AGGGCCTTGCCGCAGCGCAGG |
| 1518 | G6PD | CCGCAGCGCAGGATGAAGGGC |
| 1519 | G6PD | CAGTATGAGGGCACCTACAAG |
| 1520 | G6PD | CCAGTATGAGGGCACCTACAA |
| 1521 | G6PD | AGCTGGAGAAGCCCAAGCCCA |
| 1522 | G6PD | ACCCCACTGCTGCACCAGATT |
| 1523 | G6PD | CACCCCACTGCTGCACCAGAT |
| 1524 | G6PD | TCACCCCACTGCTGCACCAGA |
| 1525 | G6PD | TGCGGGAGCCAGATGCACTTC |
| 1526 | G6PD | AACCCCGAGGAGTCGGAGCTG |
| 1527 | G6PD | TTCAACCCCGAGGAGTCGGAG |
| 1528 | G6PD | CACCAGCAGTGCAAGCGCAAC |
| 1529 | G6PD | CATGATGTGGCCGGCGACATC |
| 1530 | G6PD | ATCCTGCGCTGCGGCAAGGCC |
| 1531 | G6PD | CGCCACGTAGGGGTGCCCTTC |
| 1532 | G6PD | CCGCCACGTAGGGGTGCCCTT |
| 1533 | KIF11 | ATGAAGATAAATTGATAGCAC |
| 1534 | KIF11 | ATAGCACAAAATCTAGAACTT |
| 1535 | KIF11 | ATGAAACCATAAAAATTGGTT |
| 1536 | KIF11 | GTTTGACTAAGCTTAATTGCT |
| 1537 | KIF11 | GACTAAGCTTAATTGCTTTCT |
| 1538 | KIF11 | ACTAAGCTTAATTGCTTTCTG |
| 1539 | KIF11 | ATTGCTTTCTGGAACAGGATC |
| 1540 | KIF11 | CTTTCTGGAACAGGATCTGAA |
| 1541 | KIF11 | CTGGAACAGGATCTGAAACTG |
| 1542 | KIF11 | TGGAACAGGATCTGAAACTGG |
| 1543 | KIF11 | TCTAATGTCCGTTAAAGGTAC |
| 1544 | KIF11 | AAGGTACGACACCACAGAGGA |
| 1545 | KIF11 | TTTATACCCATCAACACTGGT |
| 1546 | KIF11 | ATACCCATCAACACTGGTAAG |
| 1547 | KIF11 | TACCCATCAACACTGGTAAGA |
| 1548 | KIF11 | ATCAGCTGAAAAGGAAACAGC |
| 1549 | KIF11 | ATGATGCTAAACTGTTCAGAA |
| 1550 | KIF11 | AGAAAACAACAAAGAAGAGAC |
| 1551 | KIF11 | CTTCTTTTAGGATGTGGATGT |
| 1552 | KIF11 | TTCTTTTAGGATGTGGATGTA |
| 1553 | KIF11 | TTTTAGGATGTGGATGTAGAA |
| 1554 | KIF11 | TAGGATGTGGATGTAGAAGAG |
| 1555 | KIF11 | AGGATGTGGATGTAGAAGAGG |
| 1556 | KIF11 | GGATGTGGATGTAGAAGAGGC |
| 1557 | KIF11 | TGGGGCAGTATACTGAAGAAC |
| 1558 | KIF11 | TTCATCAATTGGCGGGGTTCC |
| 1559 | KIF11 | ATCAATTGGCGGGGTTCCATT |
| 1560 | KIF11 | GCGGGGTTCCATTTTTCCAGG |
| 1561 | KIF11 | TCCCGCCTTAAATCCACAGCA |
| 1562 | KIF11 | CCCGCCTTAAATCCACAGCAT |
| 1563 | KIF11 | CCGCCTTAAATCCACAGCATA |
| 1564 | KIF11 | AATCCACAGCATAAAAAATCA |
| 1565 | KIF11 | ACACACTGGAGAGGTCTAAAG |
| 1566 | KIF11 | GTTACAAAGAGCAGATTACCT |
| 1567 | KIF11 | CAAAGAGCAGATTACCTCTGC |
| 1568 | KIF11 | CCTCTGCGAGCCCAGATCAAC |
| 1569 | KIF11 | TAGATTTTGTGCTATCAATTT |
| 1570 | KIF11 | AGTTCTAGATTTTGTGCTATC |
| 1571 | KIF11 | ATTAAGTTCTAGATTTTGTGC |
| 1572 | KIF11 | CATTAAGTTCTAGATTTTGTG |
| 1573 | KIF11 | TGGTTTCATTAAGTTCTAGAT |
| 1574 | KIF11 | ATGGTTTCATTAAGTTCTAGA |
| 1575 | KIF11 | TATGGTTTCATTAAGTTCTAG |
| 1576 | KIF11 | TTATGGTTTCATTAAGTTCTA |
| 1577 | KIF11 | GTCAAACCAATTTTTATGGTT |
| 1578 | KIF11 | AGCTTAGTCAAACCAATTTTT |
| 1579 | KIF11 | CAGAAAGCAATTAAGCTTAGT |
| 1580 | KIF11 | AGATCCTGTTCCAGAAAGCAA |
| 1581 | KIF11 | CAGATCCTGTTCCAGAAAGCA |
| 1582 | KIF11 | GGATATCCAGTTTCAGATCCT |
| 1583 | KIF11 | AAGTACCTGTTGGGATATCCA |
| 1584 | KIF11 | AAAGTACCTGTTGGGATATCC |
| 1585 | KIF11 | TAAAGTACCTGTTGGGATATC |
| 1586 | KIF11 | TCTTTTAAAGTACCTGTTGGG |
| 1587 | KIF11 | CTCTTTTAAAGTACCTGTTGG |
| 1588 | KIF11 | TATTTCTCTTTTAAAGTACCT |
| 1589 | KIF11 | ATGGGTATAAATAACTTTTCC |
| 1590 | KIF11 | CCAGTGTTGATGGGTATAAAT |
| 1591 | KIF11 | TTACCAGTGTTGATGGGTATA |
| 1592 | KIF11 | AGTTCTTACCAGTGTTGATGG |
| 1593 | KIF11 | ACGTGGTTCAGTTCTTACCAG |
| 1594 | KIF11 | AGCTGATCAAGGAGATGTTCA |
| 1595 | KIF11 | CAGCTGATCAAGGAGATGTTC |
| 1596 | KIF11 | TCAGCTGATCAAGGAGATGTT |
| 1597 | KIF11 | CTTTTCAGCTGATCAAGGAGA |
| 1598 | KIF11 | CCTTTTCAGCTGATCAAGGAG |
| 1599 | KIF11 | ACAGCTCAGGCTGTTTCCTTT |
| 1600 | KIF11 | GCATCATTAACAGCTCAGGCT |
| 1601 | KIF11 | AGCATCATTAACAGCTCAGGC |
| 1602 | KIF11 | TGAACAGTTTAGCATCATTAA |
| 1603 | KIF11 | CTGAACAGTTTAGCATCATTA |
| 1604 | KIF11 | TCTGAACAGTTTAGCATCATT |
| 1605 | KIF11 | TTTTCTGAACAGTTTAGCATC |
| 1606 | KIF11 | TTGTTTTCTGAACAGTTTAGC |
| 1607 | KIF11 | TTTGTTGTTTTCTGAACAGTT |
| 1608 | KIF11 | TCTCTTCTTTGTTGTTTTCTG |
| 1609 | KIF11 | CCGGAATTGTCTCTTCTTTGT |
| 1610 | KIF11 | ACCGGAATTGTCTCTTCTTTG |
| 1611 | KIF11 | AATTTACCGGAATTGTCTCTT |
| 1612 | KIF11 | AAATTTACCGGAATTGTCTCT |
| 1613 | KIF11 | AGTATACTGCCCCAGAACTGC |
| 1614 | KIF11 | TTCAGTATACTGCCCCAGAAC |
| 1615 | KIF11 | GAGGTTCTTCAGTATACTGCC |
| 1616 | KIF11 | ACTTAGAGGTTCTTCAGTATA |
| 1617 | KIF11 | ATGAACAATCCACACCAGCAT |
| 1618 | KIF11 | TCTGATATGACATACCTGGAA |
| 1619 | KIF11 | TCTTTTCCATGTGATTTTTTA |
| 1620 | KIF11 | GTCTTTTCCATGTGATTTTTT |
| 1621 | KIF11 | TTTGTCTTTTCCATGTGATTT |
| 1622 | KIF11 | CTTTGTCTTTTCCATGTGATT |
| 1623 | KIF11 | TCTTTGTCTTTTCCATGTGAT |
| 1624 | KIF11 | ATGCCTCTGTTTTCTTTGTCT |
| 1625 | KIF11 | GACCTCTCCAGTGTGTTAATG |
| 1626 | KIF11 | AGACCTCTCCAGTGTGTTAAT |
| 1627 | KIF11 | CACTTTAGACCTCTCCAGTGT |
| 1628 | KIF11 | TTCCACTTTAGACCTCTCCAG |
| 1629 | KIF11 | CTTCCACTTTAGACCTCTCCA |
| 1630 | KIF11 | TAACCAAGTGCTCTGTAGTTT |
| 1631 | KIF11 | GTAACCAAGTGCTCTGTAGTT |
| 1632 | KIF11 | ATCTGGGCTCGCAGAGGTAAT |
| 1633 | KIF11 | AAGGTTGATCTGGGCTCGCAG |
| 1634 | KIF11 | CCAACCCCCAAGTGAATTAAA |
| — | — | — |

TABLE 22
SpyCas9 guide RNAs

| SEQ | | Target Domain |
|---|---|---|
| ID NO | Gene | Sequence (DNA) |
| 1635 | GAPDH | TCTAGGTATGAGAACGAATT |
| 1636 | GAPDH | AGCCCCAGCGTCAAAGGTGG |
| 1637 | TBP | ATTGTATCCACAGTGAATCT |
| 1638 | TBP | AAACGCCGAATATAATCCCA |
| 1639 | TBP | ACCATTGTAGCGGTTTGCTG |
| 1640 | TBP | GGTTTGCTGCGGTAATCATG |
| 1641 | TBP | GATAAGAGAGCCACGAACCA |
| 1642 | TBP | ACGGCACTGATTTTCAGTTC |
| 1643 | TBP | CGGCACTGATTTTCAGTTCT |
| 1644 | TBP | GATTTTCAGTTCTGGGAAAA |
| 1645 | TBP | TCTGGGAAAATGGTGTGCAC |
| 1646 | TBP | TGGTGTGCACAGGAGCCAAG |
| 1647 | TBP | TAGTGAAGAACAGTCCAGAC |
| 1648 | TBP | TGCTAGAGTTGTACAGAAGT |
| 1649 | TBP | GCTAGAGTTGTACAGAAGTT |
| 1650 | TBP | GGGTTTTCCAGCTAAGTTCT |
| 1651 | TBP | GGACTTCAAGATTCAGAATA |
| 1652 | TBP | CTTCAAGATTCAGAATATGG |
| 1653 | TBP | TTCAAGATTCAGAATATGGT |
| 1654 | TBP | TCAAGATTCAGAATATGGTG |
| 1655 | TBP | GTGATGTGAAGTTTCCTATA |
| 1656 | TBP | AAGTTTCCTATAAGGTTAGA |
| 1657 | TBP | TCACCCACCAACAATTTAGT |
| 1658 | TBP | TATGAGCCAGAGTTATTTCC |
| 1659 | TBP | GTTCTCCTTATTTTTGTTTC |
| 1660 | TBP | TCTGGAAAAGTTGTATTAAC |
| 1661 | TBP | AAACATCTACCCTATTCTAA |
| 1662 | TBP | ACCCTATTCTAAAGGGATTC |
| 1663 | TBP | GATTCAGGAAGACGACGTAA |
| 1664 | TBP | CACGAAGTGCAATGGTCTTT |
| 1665 | TBP | GTTTCGGGCACGAAGTGCAA |
| 1666 | TBP | GGGATTATATTCGGCGTTTC |
| 1667 | TBP | TGGGATTATATTCGGCGTTT |
| 1668 | TBP | TCTAACCTTGGGATTATATT |
| 1669 | TBP | ATTAAAATAGATCTAACCTT |
| 1670 | TBP | AAAATCAGTGCCGTGGTTCG |
| 1671 | TBP | AGAACTGAAAATCAGTGCCG |
| 1672 | TBP | AATTTCTTACGGCTACCTCT |
| 1673 | TBP | AGTCTGGACTGTTCTTCACT |
| 1674 | TBP | ATATTTTCTTGCTGCCAGTC |
| 1675 | TBP | TTGAAGTCCAAGAACTTAGC |
| 1676 | TBP | ACAAGGCCTTCTAACCTTAT |
| 1677 | TBP | ATTGTTGGTGGGTGAGCACA |
| 1678 | TBP | TTACCTACTAAATTGTTGGT |
| 1679 | TBP | CTTACCTACTAAATTGTTGG |
| 1680 | TBP | AGACTTAGCTAGTAAATTGT |
| 1681 | TBP | ATTAAACCAGGAAATAACTC |
| 1682 | TBP | ATCATTCTGTAGATTAAACC |
| 1683 | TBP | AAAATAAGGAGAACAATTCT |
| 1684 | TBP | CTTTTCCAGAAACAAAAATA |
| 1685 | TBP | TCCTGAATCCCTTTAGAATA |
| 1686 | TBP | TTCCTGAATCCCTTTAGAAT |
| 1687 | E2F4 | CTCACTCCCACTGCTGTCCC |
| 1688 | E2F4 | CCCTGGCAGTGCAGAAGTCC |
| 1689 | E2F4 | CCTGGCAGTGCAGAAGTCCA |
| 1690 | E2F4 | CAGTGCAGAAGTCCAGGGAA |
| 1691 | E2F4 | GCAGAAGTCCAGGGAATGGC |
| 1692 | E2F4 | GGCCCAGCAGCTGAGATCAC |
| 1693 | E2F4 | GGGGCTATCATTGTAGTGAG |
| 1694 | E2F4 | GCTATCATTGTAGTGAGTGG |
| 1695 | E2F4 | ATTGTAGTGAGTGGCGGCCC |
| 1696 | E2F4 | TTGTAGTGAGTGGCGGCCCT |
| 1697 | E2F4 | CGGCCCTGGGACTGATAGCA |
| 1698 | E2F4 | GGGACTGATAGCAAGGACAG |
| 1699 | E2F4 | TGAGCTCAGTTCACTCCCAC |
| 1700 | E2F4 | GAGCTCAGTTCACTCCCACT |
| 1701 | E2F4 | CCCACTGGGCCCAACAACAC |
| 1702 | E2F4 | GCCCAACAACACTGGACACC |
| 1703 | E2F4 | ACTGCAGTCTTCTGCCCTGC |
| 1704 | E2F4 | AGTAACAGCAGCAGTTCGTC |
| 1705 | E2F4 | TACCTCCTTTGAGCCCATCA |
| 1706 | E2F4 | CCCATCAAGGCAGACCCCAC |
| 1707 | E2F4 | ATCAAGGCAGACCCCACAGG |
| 1708 | E2F4 | GAAATCTTTGATCCCACACG |
| 1709 | E2F4 | TCTTTGATCCCACACGAGGT |
| 1710 | E2F4 | ATTCCCAGAGTGCATGAGCT |
| 1711 | E2F4 | GTGCATGAGCTCGGAGCTGC |
| 1712 | E2F4 | GAGGAGTTGATGTCCTCAGA |
| 1713 | E2F4 | GAGTTGATGTCCTCAGAAGG |
| 1714 | E2F4 | AGTTGATGTCCTCAGAAGGT |
| 1715 | E2F4 | GCTTCGTCTTTCTCCACCCC |
| 1716 | E2F4 | CTTCGTCTTTCTCCACCCCC |
| 1717 | E2F4 | CCACGATTATATCTACAACC |
| 1718 | E2F4 | TACAACCTGGACGAGAGTGA |
| 1719 | E2F4 | GCACTGCCAGGGACAGCAGT |
| 1720 | E2F4 | TGCACTGCCAGGGACAGCAG |
| 1721 | E2F4 | CCTGGACTTCTGCACTGCCA |
| 1722 | E2F4 | CCCTGGACTTCTGCACTGCC |
| 1723 | E2F4 | CTGCTGGGCCAGCCATTCCC |
| 1724 | E2F4 | TGTCCTTGCTATCAGTCCCA |
| 1725 | E2F4 | CTGTCCTTGCTATCAGTCCC |
| 1726 | E2F4 | CCAGTGTTGTTGGGCCCAGT |
| 1727 | E2F4 | TCCAGTGTTGTTGGGCCCAG |
| 1728 | E2F4 | GCCGGGTGTCCAGTGTTGTT |
| 1729 | E2F4 | GGCCGGGTGTCCAGTGTTGT |
| 1730 | E2F4 | AGCAGGGCAGAAGACTGCAG |
| 1731 | E2F4 | GCTGCTGCTGCTGTCCAGCA |
| 1732 | E2F4 | GGAGGTAGAAGGGTTGGGTC |
| 1733 | E2F4 | TGGGCTCAAAGGAGGTAGAA |
| 1734 | E2F4 | ATGGGCTCAAAGGAGGTAGA |
| 1735 | E2F4 | TGCCTTGATGGGCTCAAAGG |
| 1736 | E2F4 | GTCTGCCTTGATGGGCTCAA |
| 1737 | E2F4 | CCTGTGGGGTCTGCCTTGAT |
| 1738 | E2F4 | ACCTGTGGGGTCTGCCTTGA |
| 1739 | E2F4 | GCAGGTACTCACCACCTGTG |
| 1740 | E2F4 | GGCAGGTACTCACCACCTGT |
| 1741 | E2F4 | GGGCAGGTACTCACCACCTG |
| 1742 | E2F4 | AGATTTCTGACAGCTCTTTG |
| 1743 | E2F4 | AAGATTTCTGACAGCTCTTT |
| 1744 | E2F4 | AAAGATTTCTGACAGCTCTT |
| 1745 | E2F4 | TGCAGCAGCCTACCTCGTGT |
| 1746 | E2F4 | ATGCAGCAGCCTACCTCGTG |
| 1747 | E2F4 | GCTCCGAGCTCATGCACTCT |
| 1748 | E2F4 | AGCTCCGAGCTCATGCACTC |
| 1749 | E2F4 | CCAGGGCCACCCACCTTCTG |
| 1750 | E2F4 | TGGAGAAAGACGAAGCAGAG |
| 1751 | E2F4 | GTGGAGAAAGACGAAGCAGA |
| 1752 | E2F4 | GGTGGAGAAAGACGAAGCAG |
| 1753 | E2F4 | TAATCGTGGTCTCCCGGGGG |
| 1754 | E2F4 | ATATAATCGTGGTCTCCCGG |
| 1755 | E2F4 | GATATAATCGTGGTCTCCCG |
| 1756 | E2F4 | AGATATAATCGTGGTCTCCC |
| 1757 | E2F4 | TAGATATAATCGTGGTCTCC |
| 1758 | E2F4 | CGAGGTTGTAGATATAATCG |
| 1759 | E2F4 | AGACACCTTCACTCTCGTCC |
| 1760 | E2F4 | TGAGAACAGGCACATCAAAG |
| 1761 | G6PD | GTGGGGGTTCACCCACTTGT |
| 1762 | G6PD | ACTTGTAGGTGCCCTCATAC |
| 1763 | G6PD | CATCAGCTCGTCTGCCTCCG |
| 1764 | G6PD | ATCAGCTCGTCTGCCTCCGT |
| 1765 | G6PD | TCAGCTCGTCTGCCTCCGTG |
| 1766 | G6PD | CGTCTGCCTCCGTGGGGCCT |
| 1767 | G6PD | TGCCTCCGTGGGGCCTCGGC |
| 1768 | G6PD | TCCTCACCTGCCATAAATAT |
| 1769 | G6PD | CCTCACCTGCCATAAATATA |
| 1770 | G6PD | CTCACCTGCCATAAATATAG |
| 1771 | G6PD | CCTGCCATAAATATAGGGGA |
| 1772 | G6PD | CTGCCATAAATATAGGGGAT |
| 1773 | G6PD | ATAAATATAGGGGATGGGCT |
| 1774 | G6PD | TAAATATAGGGGATGGGCTT |
| 1775 | G6PD | TGGGCTTCTCCAGCTCAATC |
| 1776 | G6PD | AGCTCAATCTGGTGCAGCAG |
| 1777 | G6PD | GCTCAATCTGGTGCAGCAGT |
| 1778 | G6PD | CTCAATCTGGTGCAGCAGTG |
| 1779 | G6PD | CAGTGGGGTGAAAATACGCC |
| 1780 | G6PD | TGAAAATACGCCAGGCCTCA |
| 1781 | G6PD | CCTCACGGAGCTCGTCGCTG |
| 1782 | G6PD | ACCTGCGCACGAAGTGCATC |
| 1783 | G6PD | GGCTCCCGCAGAAGACGTCC |
| 1784 | G6PD | CGCAGAAGACGTCCAGGATG |
| 1785 | G6PD | GTCCAGGATGAGGCGCTCAT |
| 1786 | G6PD | ATGAGGCGCTCATAGGCGTC |
| 1787 | G6PD | TGAGGCGCTCATAGGCGTCA |
| 1788 | G6PD | CACCTTGTATCTGTTGCCGT |
| 1789 | G6PD | TGTATCTGTTGCCGTAGGTC |
| 1790 | G6PD | CAGGTCCAGCTCCGACTCCT |
| 1791 | G6PD | AGGTCCAGCTCCGACTCCTC |
| 1792 | G6PD | GGTCCAGCTCCGACTCCTCG |
| 1793 | G6PD | TCGGGGTTGAAGAACATGCC |
| 1794 | G6PD | GAAGAACATGCCCGGCTTCT |
| 1795 | G6PD | CGGCTTCTTGGTCATCATCT |
| 1796 | G6PD | GGTCATCATCTTGGTGTACA |
| 1797 | G6PD | CTTGGTGTACACGGCCTCGT |
| 1798 | G6PD | TTGGTGTACACGGCCTCGTT |
| 1799 | G6PD | CGGCCTCGTTGGGCTGCACG |
| 1800 | G6PD | GCTCGTTGCGCTTGCACTGC |
| 1801 | G6PD | CGTTGCGCTTGCACTGCTGG |
| 1802 | G6PD | CTGCTGGTGGAAGATGTCGC |
| 1803 | G6PD | AGATGTCGCCGGCCACATCA |
| 1804 | G6PD | ATGGAACTGCAGCCTCACCT |
| 1805 | G6PD | CCTCGGCCTTGCGCTCGTTC |
| 1806 | G6PD | CTCGGCCTTGCGCTCGTTCA |
| 1807 | G6PD | TCAGGGCCTTGCCGCAGCGC |
| 1808 | G6PD | CTTGCCGCAGCGCAGGATGA |
| 1809 | G6PD | TTGCCGCAGCGCAGGATGAA |
| 1810 | G6PD | GTATGAGGGCACCTACAAGT |
| 1811 | G6PD | AGTATGAGGGCACCTACAAG |
| 1812 | G6PD | AGAGTGGGTTTCCAGTATGA |
| 1813 | G6PD | GAGAGTGGGTTTCCAGTATG |
| 1814 | G6PD | GACGAGCTGATGAAGAGAGT |
| 1815 | G6PD | AGACGAGCTGATGAAGAGAG |
| 1816 | G6PD | CTCCAGCCGAGGCCCCACGG |
| 1817 | G6PD | CACCCGTCACTCTCCAGCCG |
| 1818 | G6PD | CCATCCCCTATATTTATGGC |
| 1819 | G6PD | AAGCCCATCCCCTATATTTA |
| 1820 | G6PD | ACTGCTGCACCAGATTGAGC |
| 1821 | G6PD | GCGACGAGCTCCGTGAGGCC |
| 1822 | G6PD | CCTCAGCGACGAGCTCCGTG |
| 1823 | G6PD | GCCAGATGCACTTCGTGCGC |
| 1824 | G6PD | TCATCCTGGACGTCTTCTGC |
| 1825 | G6PD | CTCATCCTGGACGTCTTCTG |
| 1826 | G6PD | CGCCTATGAGCGCCTCATCC |
| 1827 | G6PD | GACCTACGGCAACAGATACA |
| 1828 | G6PD | TCGGAGCTGGACCTGACCTA |
| 1829 | G6PD | CAACCCCGAGGAGTCGGAGC |
| 1830 | G6PD | GTTCTTCAACCCCGAGGAGT |
| 1831 | G6PD | GGGCATGTTCTTCAACCCCG |
| 1832 | G6PD | AAGATGATGACCAAGAAGCC |
| 1833 | G6PD | CAAGATGATGACCAAGAAGC |
| 1834 | G6PD | GATCCGCGTGCAGCCCAACG |
| 1835 | G6PD | GCAGTGCAAGCGCAACGAGC |
| 1836 | G6PD | CTGCAGTTCCATGATGTGGC |
| 1837 | G6PD | GAGGCTGCAGTTCCATGATG |
| 1838 | G6PD | ACGAGCGCAAGGCCGAGGTG |
| 1839 | G6PD | CCTGAACGAGCGCAAGGCCG |
| 1840 | G6PD | CAAGGCCCTGAACGAGCGCA |
| 1841 | G6PD | CTTCATCCTGCGCTGCGGCA |
| 1842 | G6PD | GTGCCCTTCATCCTGCGCTG |
| 1843 | G6PD | AGAATGAGAGGTGGGATGGT |
| 1844 | G6PD | GTGGAGAATGAGAGGTGGGA |
| 1845 | KIF11 | CTTAATGAAACCATAAAAAT |
| 1846 | KIF11 | GACTAAGCTTAATTGCTTTC |
| 1847 | KIF11 | GCTTAATTGCTTTCTGGAAC |
| 1848 | KIF11 | TCTGGAACAGGATCTGAAAC |
| 1849 | KIF11 | CTGAAACTGGATATCCCAAC |
| 1850 | KIF11 | TTAAAGGTACGACACCACAG |
| 1851 | KIF11 | TTATTTATACCCATCAACAC |
| 1852 | KIF11 | ATCTCCTTGATCAGCTGAAA |
| 1853 | KIF11 | CAACAAAGAAGAGACAATTC |
| 1854 | KIF11 | TTAGGATGTGGATGTAGAAG |
| 1855 | KIF11 | GGATGTAGAAGAGGCAGTTC |
| 1856 | KIF11 | GATGTAGAAGAGGCAGTTCT |
| 1857 | KIF11 | ATGTAGAAGAGGCAGTTCTG |
| 1858 | KIF11 | CAAGAGCCATCTGTAGATGC |
| 1859 | KIF11 | GCCATCTGTAGATGCTGGTG |
| 1860 | KIF11 | GGTGTGGATTGTTCATCAAT |
| 1861 | KIF11 | GTGGATTGTTCATCAATTGG |
| 1862 | KIF11 | TGGATTGTTCATCAATTGGC |
| 1863 | KIF11 | GGATTGTTCATCAATTGGCG |
| 1864 | KIF11 | TGGCGGGGTTCCATTTTTCC |
| 1865 | KIF11 | CCACAGCATAAAAAATCACA |
| 1866 | KIF11 | GGAAAAGACAAAGAAAACAG |
| 1867 | KIF11 | AAACAGAGGCATTAACACAC |
| 1868 | KIF11 | GAGGCATTAACACACTGGAG |
| 1869 | KIF11 | CACACTGGAGAGGTCTAAAG |
| 1870 | KIF11 | GGAAGAAACTACAGAGCACT |
| 1871 | KIF11 | CTTAGTCAAAGCAATTTTTA |
| 1872 | KIF11 | TCTCTTTTAAAGTACCTGTT |
| 1873 | KIF11 | TTCTCTTTTAAAGTACCTGT |
| 1874 | KIF11 | TATAAATAACTTTTCCTCTG |
| 1875 | KIF11 | CAGTTCTTACCAGTGTTGAT |
| 1876 | KIF11 | TCAGTTCTTACCAGTGTTGA |
| 1877 | KIF11 | TGATCAAGGAGATGTTCACG |
| 1878 | KIF11 | GTTTCCTTTTCAGCTGATCA |
| 1879 | KIF11 | TTTAGCATCATTAACAGCTC |
| 1880 | KIF11 | ACAGATGGCTCTTGACTTAG |
| 1881 | KIF11 | TCCACACCAGCATCTAGAGA |
| 1882 | KIF11 | ATATGACATACCTGGAAAAA |
| 1883 | KIF11 | AGGTTGATCTGGGCTCGCAG |
| 1884 | KIF11 | AGTGAATTAAAGGTTGATCT |
| 1885 | KIF11 | AAGTGAATTAAAGGTTGATC |
| — | — | — |

### Example 20—a Second Round of Editing with RNP and Donor Templates or RNP Alone Enables Further Enrichment of iPSCs with Transgenes Targeted at the GAPDH Gene Locus

[0881] The present example relates to the introduction of two immunologically relevant genes inserted biallelically, and in a bicistronic manner at the GAPDH gene. Two different donor templates (e.g., donor nucleic acid constructs) one containing the gene sequences for the PDL1 immuno-regulatory molecule and a safety switch as its genetic payload, and the other donor template comprising CD47 immuno-regulatory molecule and the same safety switch as its genetic payload were targeted to the GAPDH locus (FIG. 43A). Following the first round of editing with ribonucleoprotein (RNP) Cpf1 nuclease and guide RNA complex gene editing system, PDL1-based and CD47-based donor templates, ˜8.1% of PDL1-positive, ˜2.2% of CD47-positive, and ˜2.4% of PDL1/CD47-double positive cells were obtained. This indicated that donor nucleic acid constructs with their flanking homology arms had integrated correctly at the GAPDH locus restoring the disruption that had been caused by nuclease cutting within the GAPDH exon. This result was surprising because the double positive results were far superior to expected and previously seen results (e.g., as described in the art). Note that the single knock-in efficiency for CD47 was lower than the double knock in, potentially because PD-L1 incorporation was more efficient and assisted with higher rates of biallelic incorporation.

[0882] To further enrich for the population of edited cells, cells were expanded and then re-edited by providing the pool of surviving cells with either RNP and both donor templates (e.g., donor nucleic acid constructs) again, or RNP alone. In the sample re-edited with RNP and both donor templates (e.g., donor nucleic acid constructs), the population of PDL1-positive cells increased to ˜63.8%, the population of CD47-positive cells increased to ˜6.5%, and the population of PDL1/CD47-double positive cells increased to ˜18.9%. In the sample re-edited with RNP only, the population of PDL1-positive cells increased to ˜59.0%, the population of CD47-positive cells increased to ˜10.4%, and the population of PDL1/CD47-double positive cells increased to ˜13.4%. There was a decrease of unedited cells from 87.4% to 10.8% with RNP and donor templates, or to 17.3% with RNP alone. In either case, providing a second round of RNP allowed selective removal of non-targeted cells via GAPDH exon cutting, and therefore further enrichment of cells targeted with either or both of the PDL1-based and CD47-based donor templates (e.g., nucleic acid constructs).

[0883] In a separate study, the same PDL1-based donor template was used to target PDL1 to the GAPDH locus (FIG. 43B). Following the first round of editing with RNP and the PDL1-based donor template ˜0.8% of PDL1-positive cells were obtained. To further enrich for the population of edited cells, cells were expanded and then re-edited by providing the surviving population of cells with RNP alone. In the sample re-edited with RNP only, the population of PDL1-positive cells increased to 64.7%. This data indicates that editing with a second round of RNP allowed selective removal of non-targeted cells via GAPDH exon cutting, and therefore further enrichment of cells targeted with the PDL1-based donor template.

### Example 21—Editing in PSCs with Two Different Donor Templates Including Suicide Switch Components, and RNP Targeted to the Coding Region of GAPDH Gene Enables Enrichment of Biallelically Edited Cells and Therefore Dimerization of Suicide Switch Components

[0884] The present example relates to the introduction of two knock-in cassettes each encoding multiple gene products of interest as their genetic payloads. Two different donor templates (e.g., nucleic acid constructs) that contain the PDL1 or CD47 immuno-regulatory molecules were targeted to the GAPDH gene (FIG. 44). The PDL1-based donor template was comprised of the coding sequence for FRB (FKBP12-rapamycin binding domain fragment of, mammalian target of rapamycin(mTOR)) linked via a GS linker to the coding sequence for the truncated caspase 9 gene (dCasp9), which was linked via a P2A self-cleaving peptide to the coding sequence for the PDL1 gene. The CD47-based donor template was comprised of the coding sequence for FKBP12 (Peptidyl-prolyl cis-trans isomerase FKBP12, encoding the 12-kDa FK506-binding protein) linked via a GS linker to the coding sequence for the truncated caspase 9 gene (dCasp9), which was linked via a P2A self-cleaving peptide to the coding sequence for the PDL1 gene. The FRB-dCasp9 and FKBP12-dCasp9 sequences form the two necessary components of the rapamycin inducible Caspase 9 kill switch (rapaCasp9). In the presence of rapamycin, the FRB and FKBP12 domains will heterodimerize causing the truncated Caspase 9 proteins to homodimerize, this in turn activates downstream effector caspases to trigger apoptosis in biallelically edited rapaCasp9 cells.

[0885] After editing of PSCs with GAPDH-targeting RNP and PDL1-based and CD47-based donor templates, surviving cells were allowed to recover and expand, and flow cytometric analysis was performed one week later on a population of PSCs stained with anti-PDL-1 and anti-CD47 antibodies. After cytometric analysis, provision of surviving cells with GAPDH-targeting RNP and two different donor templates (e.g., donor nucleic acid constructs) together (FRB-dCasp9-PDL1 and FKBP12-dCasp9-CD47) resulted in PDL1-positive PSCs (˜11.9%), CD47-positive PSCs (˜9.8%), and cells that were double-positive for PDL1 and CD47 (˜3.5%), indicating that some cells had biallelically integrated the two genetic payloads: both an FRB-dCasp9-PDL1 transgene and an FKBP12-dCasp9-CD47 transgene targeted to the GAPDH gene, which restored the disruption that had been caused by nuclease cutting within the GAPDH exon (e.g., coding region). These results are striking, as cells that are biallelically edited for two different large donor constructs at the same gene locus are usually very rare events when performing homologous recombination experiments in PSCs.

### EQUIVALENTS

[0886] It is to be understood that while the disclosure has been described in conjunction with the detailed description thereof, the foregoing description is intended to illustrate and not limit the scope of the present disclosure, which is defined by the scope of the appended claims. Other aspects, advantages, and modifications are within the scope of the following claims.

We claim:

1. A method of editing the genome of a cell, the method comprising contacting the cell with:
a nuclease that causes a break within an endogenous coding sequence of an essential gene in the cell, wherein the essential gene encodes a gene product that is required for survival and/or proliferation of the cell, and
(ii) a donor template that comprises a knock-in cassette comprising an exogenous coding sequence for a gene product of interest in frame with and downstream (3′) of an exogenous coding sequence or partial coding sequence of the essential gene, wherein the knock-in cassette is integrated into the genome of the cell by homology-directed repair (HDR) of the break, resulting in a genome-edited cell that expresses:
(a) the gene product of interest, and
(b) the gene product encoded by the essential gene that is required for survival and/or proliferation of the cell, or a functional variant thereof.

2. The method of claim 1, wherein, if the knock-in cassette is not integrated into the genome of the cell by homology-directed repair (HDR) in the correct position or orientation, the cell no longer expresses the gene product encoded by the essential gene, or a functional variant thereof.

3. The method of claim 1 or 2, wherein the break is a double-strand break.

4. The method of any one of claims 1-3, wherein the break is located within the last 1000, 500, 400, 300, 200, 100, or 50 base pairs of the endogenous coding sequence of the essential gene.

5. The method of any one of claims 1-3, wherein the break is located within the last exon of the essential gene.

6. The method of any one of claims 1-5, wherein the nuclease is a CRISPR/Cas nuclease and the method further comprises contacting the cell with a guide molecule for the CRISPR/Cas nuclease.

7. The method of any one of claims 1-5, wherein the nuclease is a zinc finger nuclease (ZFN), a transcription activator-like effector nuclease (TALEN) or a meganuclease.

8. The method of any one of claims 1-7, wherein the donor template is a donor DNA template, optionally wherein the donor DNA template is double-stranded.

9. The method of claim 8, wherein the donor DNA template is a plasmid, optionally wherein the plasmid has not been linearized.

10. The method of any one of claims 1-9, wherein the donor template comprises homology arms on either side of the knock-in cassette.

11. The method of claim 10, wherein the homology arms correspond to sequences located on either side of the break in the genome of the cell.

12. The method of any one of claims 1-11, wherein the knock-in cassette comprises a regulatory element that enables expression of the gene product encoded by the essential gene and the gene product of interest as separate gene products, optionally, wherein at least one of the gene products is a protein and the regulatory element enables expression of that protein separate from the other gene product.

13. The method of claim 12, wherein the knock-in cassette comprises an IRES or 2A element located between the exogenous coding sequence or partial coding sequence of the essential gene and the exogenous coding sequence for the gene product of interest.

14. The method of claim 13, wherein the 2A element is a T2A element (EGRGSLLTCGDVEENPGP), a P2A element (ATNFSLLKQAGDVEENPGP), a E2A element (QCTNYALLKLAGDVESNPGP), or an F2A element (VKQTLNFDLLKLAGDVESNPGP).

15. The method of claim 13 or 14, wherein the knock-in cassette further comprises a sequence encoding a linker peptide upstream of the 2A element.

16. The method of claim 15, wherein the linker peptide comprises the amino acid sequence GSG.

17. The method of any one of claims 1-16, wherein the knock-in cassette comprises a polyadenylation sequence, and optionally a 3′ UTR sequence, downstream of the exogenous coding sequence for the gene product of interest, wherein, if a 3′UTR sequence is present, the 3′UTR sequence is positioned 3′ of the exogenous coding sequence and 5′ of the polyadenylation sequence.

18. The method of any one of claims 1-17, wherein the exogenous partial coding sequence of the essential gene in the knock-in cassette encodes a C-terminal fragment of a protein encoded by the essential gene.

19. The method of claim 18, wherein the C-terminal fragment is less than 500, 250, 150, 125, 100, 75, 50, 25, 20, 15 or 10 amino acids in length.

20. The method of claim 18 or 19, wherein the C-terminal fragment includes an amino acid sequence that is encoded by a region of the endogenous coding sequence of the essential gene that spans the break.

21. The method of any one of claims 1-20, wherein the exogenous coding sequence or partial coding sequence of the essential gene in the knock-in cassette is less than 100% identical to the corresponding endogenous coding sequence of the essential gene of the cell.

22. The method of claim 21, wherein the exogenous coding sequence or partial coding sequence of the essential gene in the knock-in cassette has been codon optimized relative to the corresponding endogenous coding sequence of the essential gene of the cell to prevent further binding of the nuclease to the target site, to reduce the likelihood of recombination after integration of the knock-in cassette into the genome of the cell, and/or to increase expression of the gene product of the essential gene and/or the gene product of interest after integration of the knock-in cassette into the genome of the cell.

23. The method of any one of claims 1-22, wherein the essential gene is a housekeeping gene, e.g., a gene listed in Table 3.

24. The method of any one of claims 1-22, wherein the cell is an iPS cell or ES cell and the essential gene is involved in differentiation of iPS or ES cells or expansion of iPS- or ES-derived cells, e.g., a gene listed in Table 4.

25. The method of claim 24, wherein the iPS-derived cells are iPS-derived NK cells or iPS-derived T cells.

26. The method of any one of claims 1-25, wherein the donor template does not comprise a reporter gene, e.g., a fluorescent reporter gene or an antibiotic resistance gene.

27. The method of any one of claims 1-26, wherein the gene product of interest is a chimeric antigen receptor (CAR), a non-naturally occurring variant of FcγRIII (CD16), an interleukin (e.g., interleukin 15 (IL-15), interleukin 15 receptor (IL-15R) or a variant thereof, interleukin 12 (IL-12), interleukin-12 receptor (IL-12R) or a variant thereof), a human leukocyte antigen (e.g., human leukocyte antigen G (HLA-G), human leukocyte antigen E (HLA-E)), leukocyte surface antigen cluster of differentiation CD47 (CD47), or any combination of two or more thereof.

28. A genetically modified cell comprising a genome with an exogenous coding sequence for a gene product of interest in frame with and downstream (3′) of a coding sequence of an essential gene, wherein the essential gene encodes a gene product that is required for survival and/or proliferation of the cell.

29. An engineered cell comprising a genomic modification, wherein the genomic modification comprises an insertion of an exogenous knock-in cassette within an endogenous coding sequence of an essential gene in the cell's genome, wherein the essential gene encodes a gene product that is required for survival and/or proliferation of the cell, wherein the knock-in cassette comprises an exogenous coding sequence for a gene product of interest in frame with and downstream (3′) of an exogenous coding sequence or partial coding sequence encoding the gene product of the essential gene, or a functional variant thereof, and wherein the cell expresses the gene product of interest and the gene product encoded by the essential gene that is required for survival and/or proliferation of the cell, or a functional variant thereof, optionally wherein the gene product of interest and the gene product encoded by the essential gene are expressed from the endogenous promoter of the essential gene.

30. The cell of claim 28 or 29, wherein the cell's genome comprises a regulatory element that enables expression of the gene product encoded by the essential gene and the gene product of interest as separate gene products, optionally, wherein at least one of the gene products is a protein and the regulatory element enables expression of that protein separate from the other gene product.

31. The cell of claim 30, wherein the cell's genome comprises an IRES or 2A element located between the coding sequence of the essential gene and the exogenous coding sequence for the gene product of interest.

32. The cell of any one of claims 28-31, wherein the cell's genome comprises a polyadenylation sequence, and optionally a 3′ UTR sequence, downstream of the exogenous coding sequence for the gene product of interest, wherein, if a 3′UTR sequence is present, the 3′UTR sequence is positioned 3′ of the exogenous coding sequence and 5′ of the polyadenylation sequence.

33. The cell of any one of claims 28-32, wherein the coding sequence of the essential gene is less than 100% identical to an endogenous coding sequence of the essential gene.

34. The cell of any one of claims 28-33, wherein the essential gene is a housekeeping gene, e.g., a gene listed in Table 3.

35. The cell of any one of claims 28-33, wherein the cell is an iPS cell or ES cell and the essential gene is involved in differentiation of iPS or ES cells or expansion of iPS- or ES-derived cells, e.g., a gene listed in Table 4.

36. The cell of claim 35, wherein the iPS-derived cells are iPS-derived NK cells or iPS-derived T cells.

37. The cell of any one of claims 28-36, wherein the cell's genome does not comprise a reporter gene, e.g., a fluorescent reporter gene or an antibiotic resistance gene.

38. The cell of any one of claims 28-37, wherein the gene product of interest is a chimeric antigen receptor (CAR), a non-naturally occurring variant of FcγRIII (CD16), interleukin 15 (IL-15), interleukin 15 receptor (IL-15R) or a variant thereof, interleukin 12 (IL-12), interleukin-12 receptor (IL-12R) or a variant thereof, human leukocyte antigen G (HLA-G), human leukocyte antigen E (HLA-E), leukocyte surface antigen cluster of differentiation CD47 (CD47), or any combination of two or more thereof.

39. The cell of any one of claims 28-38, for use as a medicament.

40. The cell of any one of claims 28-38, for use in the treatment of a disease, disorder, or condition, e.g., a cancer.

41. A cell, or population of cells, produced by the method of any one of claims 1-27 or progeny thereof.

42. A system for editing the genome of a cell, the system comprising the cell, a nuclease that causes a break within an endogenous coding sequence of an essential gene of the cell, wherein the essential gene encodes a gene product that is required for survival and/or proliferation of the cell, and a donor template that comprises a knock-in cassette comprising an exogenous coding sequence for a gene product of interest in frame with and downstream (3′) of an exogenous coding sequence or partial coding sequence of the essential gene.

43. The system of claim 42, wherein the break is a double-strand break.

44. The system of claim 42 or 43, wherein the break is located within the last 1000, 500, 400, 300, 200, 100 or 50 base pairs of the coding sequence of the essential gene.

45. The system of any one of claims 42-44, wherein the break is located within the last exon of the essential gene.

46. The system of any one of claims 42-45, wherein the nuclease is a CRISPR/Cas nuclease and the system further comprises a guide molecule for the CRISPR/Cas nuclease.

47. The system of any one of claims 42-45, wherein the nuclease is a zinc finger nuclease (ZFN), a transcription activator-like effector nuclease (TALEN) or a meganuclease.

48. The system of any one of claims 42-47, wherein the donor template is a donor DNA template, optionally wherein the donor DNA template is double-stranded.

49. The system of claim 48, wherein the donor DNA template is a plasmid, optionally wherein the plasmid has not been linearized.

50. The system of any one of claims 42-49, wherein the donor template comprises homology arms on either side of the knock-in cassette.

51. The system of claim 50, wherein the homology arms correspond to sequences located on either side of the break in the genome of the cell.

52. The system of any one of claims 42-51, wherein the knock-in cassette comprises a regulatory element that enables expression of the gene product encoded by the essential gene and the gene product of interest as separate gene products, optionally, wherein at least one of the gene products is a protein and the regulatory element enables expression of that protein separate from the other gene product.

53. The system of claim 52, wherein the knock-in cassette comprises an IRES or 2A element located between the exogenous coding sequence or partial coding sequence of the essential gene and the exogenous coding sequence for the gene product of interest.

54. The system of any one of claims 42-53, wherein the knock-in cassette comprises a polyadenylation sequence, and optionally a 3′ UTR sequence, downstream of the exogenous coding sequence for the gene product of interest, wherein, if a 3′UTR sequence is present, the 3′UTR sequence is positioned 3′ of the exogenous coding sequence and 5′ of the polyadenylation sequence.

55. The system of any one of claims 42-54, wherein the exogenous partial coding sequence of the essential gene in the knock-in cassette encodes a C-terminal fragment of a protein encoded by the essential gene.

56. The system of claim 55, wherein the C-terminal fragment is less than 500, 250, 150, 125, 100, 75, 50, 25, 20, 15 or 10 amino acids in length.

57. The system of claim 55 or 56, wherein the C-terminal fragment includes an amino acid sequence that is encoded by a region of the coding sequence of the essential gene that spans the break.

58. The system of any one of claims 42-57, wherein the exogenous coding sequence or partial coding sequence of the essential gene in the knock-in cassette is less than 100% identical to the corresponding endogenous coding sequence of the essential gene of the cell.

59. The system of claim 58, wherein the exogenous coding sequence or partial coding sequence of the essential gene in the knock-in cassette has been codon optimized relative to the corresponding endogenous coding sequence of the essential gene of the cell to prevent further binding of a nuclease to the target site, to reduce the likelihood of recombination after integration of the knock-in cassette into the genome of the cell, or to increase expression of the gene product of the essential gene and/or the gene product of interest after integration of the knock-in cassette into the genome of the cell.

60. The system of claim 59, wherein the exogenous coding sequence or partial coding sequence of the essential gene in the knock-in cassette does not comprise a target site for the nuclease.

61. The system of any one of claims 42-60, wherein the essential gene is a housekeeping gene, e.g., a gene listed in Table 3.

62. The system of any one of claims 42-61, wherein the cell is an iPS cell or ES cell and the essential gene is involved in differentiation of iPS or ES cells or expansion of iPS- or ES-derived cells, e.g., a gene listed in Table 4.

63. The system of claim 62, wherein the iPS-derived cells are iPS-derived NK cells or iPS-derived T cells.

64. The system of any one of claims 42-63, wherein the donor DNA template does not comprise a reporter gene, e.g., a fluorescent reporter gene or an antibiotic resistance gene.

65. The system of any one of claims 42-64, wherein the gene product of interest is a chimeric antigen receptor (CAR), a non-naturally occurring variant of FcγRIII (CD16), interleukin 15 (IL-15), interleukin 15 receptor (IL-15R) or a variant thereof, interleukin 12 (IL-12), interleukin-12 receptor (IL-12R) or a variant thereof, human leukocyte antigen G (HLA-G), human leukocyte antigen E (HLA-E), leukocyte surface antigen cluster of differentiation CD47 (CD47), or any combination of two or more thereof.

66. A donor template comprising a knock-in cassette with an exogenous coding sequence for a gene product of interest in frame with and downstream (3′) of an exogenous coding sequence or partial coding sequence of an essential gene, wherein the essential gene encodes a gene product that is required for survival and/or proliferation of the cell.

67. The donor template of claim 66, for use in editing the genome of a cell by homology-directed repair (HDR)

68. The donor template of claim 66 or 67, wherein the donor template is a donor DNA template, optionally wherein the donor DNA template is double-stranded.

69. The donor template of claim 68, wherein the donor DNA template is a plasmid, optionally wherein the plasmid has not been linearized.

70. The donor template of any one of claims 66-69, wherein the donor template comprises homology arms on either side of the knock-in cassette.

71. The donor template of any one of claims 66-70, wherein the knock-in cassette comprises a regulatory element that enables expression of the gene product encoded by the essential gene and the gene product of interest as separate gene products, optionally, wherein at least one of the gene products is a protein and the regulatory element enables expression of that protein separate from the other gene product.

72. The donor template of claim 71, wherein the knock-in cassette comprises an 1RES or 2A element located between the exogenous coding sequence or partial coding sequence of the essential gene and the exogenous coding sequence for the gene product of interest.

73. The donor template of any one of claims 66-72, wherein the knock-in cassette comprises a polyadenylation sequence, and optionally a 3′ UTR sequence, downstream of the exogenous coding sequence for the gene product of interest, wherein, if a 3′UTR sequence is present, the 3′UTR sequence is positioned 3′ of the exogenous coding sequence and 5′ of the polyadenylation sequence.

74. The donor template of any one of claims 66-73, wherein the exogenous partial coding sequence of the essential gene in the knock-in cassette encodes a C-terminal fragment of a protein encoded by the endogenous coding sequence of the essential gene.

75. The donor template of claim 74, wherein the C-terminal fragment is less than 500, 250, 150, 125, 100, 75, 50, 25, 20, 15 or 10 amino acids in length.

76. The donor template of any one of claims 66-75, wherein the exogenous coding sequence or partial coding sequence of the essential gene in the knock-in cassette is less than 100% identical to the corresponding endogenous coding sequence of the essential gene.

77. The donor template of claim 76, wherein the exogenous coding sequence or partial coding sequence of the essential gene in the knock-in cassette has been codon optimized relative to the corresponding endogenous coding sequence of the essential gene to prevent further binding of a nuclease to the target site, to reduce the likelihood of recombination after integration of the knock-in cassette into a genome of a cell, or to increase expression of the gene product of the essential gene and/or the gene product of interest after integration of the knock-in cassette into a genome of a cell.

78. The donor template of claim 77, wherein the exogenous coding sequence or partial coding sequence of the essential gene in the knock-in cassette does not comprise a target site for a nuclease.

79. The donor template of any one of claims 66-78, wherein the essential gene is a housekeeping gene, e.g., a gene listed in Table 3.

80. The donor template of any one of claims 66-79, wherein the cell is an iPS cell or ES cell and the essential gene is involved in differentiation of iPS or ES cells or expansion of iPS- or ES-derived cells, e.g., a gene listed in Table 4.

81. The donor template of any one of claims 66-80, wherein the donor template does not comprise a reporter gene, e.g., a fluorescent reporter gene or an antibiotic resistance gene.

82. The donor template of any one of claims 66-81, wherein the gene product of interest is a chimeric antigen receptor (CAR), a non-naturally occurring variant of FcγRIII (CD16), interleukin 15 (IL-15), interleukin 15 receptor (IL-15R) or a variant thereof, interleukin 12 (IL-12), interleukin-12 receptor (IL-12R) or a variant thereof, human leukocyte antigen G (HLA-G), human leukocyte antigen E (HLA-E), leukocyte surface antigen cluster of differentiation CD47 (CD47), or any combination of two or more thereof.

83. A method of generating genetically modified mammalian cells comprising a safety switch comprising:
providing at least one donor nucleic acid construct comprising a genetic payload comprising at least one necessary component of a safety switch
wherein said genetic payload is flanked by a first homologous region (HR) and a second HR, wherein the first and second HRs are essentially homologous to a first genomic region (GR) and a second GR, respectively, wherein the first GR and the second GR are adjacent to and flank a pre-determined genomic position in an exon of an essential gene in a mammalian cell,
providing a gene editing system containing a nuclease that is targeted to the pre-determined genomic position, and
adding the at least one donor nucleic acid construct and the gene editing system into a population of mammalian cells wherein a plurality of the mammalian cells incorporate the genetic payload at the pre-determined genomic position,
wherein a disruption to the essential gene sequence caused by the nuclease is restored upon integration of the HRs and genetic payload.

84. The method of claim 83 wherein each donor nucleic acid construct comprises at least one necessary component of the safety switch.

85. The method of any of claims 83 or 84, wherein each donor nucleic acid construct comprises all of the necessary components of a safety switch.

86. The method of any one of claims 83-85 wherein a combination of the donor nucleic acid constructs contain all of the necessary components of a functional safety switch.

87. The method of any one of claims 83-86 wherein the necessary components of the safety switch dimerize to produce a functional suicide switch.

88. The method of any one of claims 83-87 wherein the genetic payload from a first donor nucleic acid construct is incorporated into a first allele of the essential gene and the genetic payload from a second donor nucleic acid construct is incorporated into a second allele of the essential gene.

89. The method of any one of claims 83-88 wherein one or more of the necessary components of the safety switch are incorporated into a first allele of the essential gene and the rest of the necessary components of the safety switch are incorporated into the second allele of the essential gene.

90. The method of any one of claims 83-89 wherein activation of the safety switch is triggered by a cellular event, an environmental event or a chemical agent.

91. The method of any of claims 83-90 wherein activation of the safety switch induces apoptosis.

92. The method of any one of claims 83-91 wherein activation of the safety switch inhibits growth of cells that have incorporated all of the necessary components of the safety switch.

93. A population of cells made by the method of any one of claims 83-92.

94. The population of cells of claim 93, wherein the cells are pluripotent stem cells (PSCs).

95. The population of cells of claim 93, wherein the cells are induced pluripotent stem cells (iPSCs).

96. A cell from the population of cells of any one of claims 93-95 wherein the cell is differentiated into a differentiated cell.

97. The differentiated cell of claim 96, wherein the differentiated cell is selected from:
a cell in the immune system, optionally selected from a T cell, a T cell expressing a chimeric antigen receptor (CAR), a suppressive T cell, a myeloid cell, a dendritic cell, and a macrophage;
a cell in the nervous system, optionally selected from a dopaminergic neuron, a microglia cell, an oligodendrocyte, an astrocyte, a cortical neuron, a spinal or oculomotor neuron, an enteric neuron, a Placode-derived cell, a Schwann cell, and a trigeminal or sensory neuron;
a cell in the ocular system, optionally selected from a retinal pigment epithelial cell, a photoreceptor cone cell, a photoreceptor rod cell, a bipolar cell, and a ganglion cell;
a cell in the cardiovascular system, optionally selected from a cardiomyocyte, an endothelial cell, and a nodal cell; or
a cell in the metabolic system, optionally selected from a hepatocyte, a cholangiocyte, and a pancreatic beta cell.

98. A method of increasing the percentage of cells in the population of cells of claim 93-97 that incorporate the genetic payload at the pre-determined genomic position comprising:
creating a first population of mammalian cells comprising cells of any of claims 93-97 by providing at least one donor nucleic acid construct comprising a specific genetic payload flanked by a first homologous region (HR) and a second HR, wherein the first and second HRs are essentially homologous to a first genomic region (GR) and a second GR, respectively, wherein the first GR and the second GR are adjacent to and flank a pre-determined genomic position in an exon of an essential gene in a mammalian cell,
providing a gene editing system containing a nuclease that is targeted to the pre-determined genomic position,
providing the at least one donor nucleic acid construct and the gene editing system into the first population of mammalian cells,
culturing the first population of mammalian cells, and
identifying the percentage of surviving cells that comprise the specific genetic payload,
creating a second population of mammalian cells by expanding the surviving cells from the first population of mammalian cells by providing to the surviving cells from the first population of mammalian cells, a gene editing system containing a nuclease that is targeted to the pre-determined genomic position;
optionally reintroducing the at least one donor construct;
culturing the second population of mammalian cells; and
identifying the percentage of surviving cells that comprise the specific exogenous genetic payload,
wherein the percentage of surviving cells from the second population of mammalian cells that comprise the specific exogenous genetic payload is higher than the percentage of surviving cells from the first population of mammalian cells that comprise the specific exogenous genetic payload.

99. The method of claim 98 wherein a plurality of the surviving cells from the first population of mammalian cells that do not comprise the specific genetic payloads are killed during the creation of the second population of mammalian cells.

100. The method of any one of claim 98 or 99 wherein a plurality of surviving cells from the first population of mammalian cells that do not comprise the specific genetic payloads incorporate the specific genetic payloads during the creation of the second population of mammalian cells.

101. The method of any one of claims 98-100 wherein the percentage of surviving cells from the second population of mammalian cells that comprise the specific genetic payloads is at least three times larger than the percentage of surviving cells from the first population of mammalian cells that comprise the specific genetic payloads.

102. The method of any one of the preceding claims 98-101 wherein the percentage of surviving cells from the second population of mammalian cells that do not comprise the specific genetic payloads is at least five (5) times lower than the percentage of surviving cells from the first population of mammalian cells that do not comprise the specific genetic payloads.

103. The method of any one of claims 98-102 wherein at least one of the donor nucleic acid constructs has a different genetic payload than at least one other donor nucleic acid constructs, and at least a plurality of the second population of mammalian cells incorporate each of the different genetic payloads.

104. The method of any one of claims 98-103 wherein the at least one of the HR regions contains at least one mutation that prevents the cutting of the genetic payload at the nuclease cutting site.

105. The method of claims 98-104 wherein identifying the percentage of surviving cells is accomplished using flow cytometry.

106. An engineered iPSC comprising a genomic modification, wherein the genomic modification comprises an insertion of an exogenous knock-in cassette within an endogenous coding sequence of a GAPDH gene in the iPSC's genome, wherein the knock-in cassette comprises an exogenous coding sequence for a safety switch in frame with and downstream (3′) of an exogenous coding sequence or partial coding sequence encoding GAPDH, or a functional variant thereof, and wherein the iPSC expresses the gene product of interest and GAPDH, or a functional variant thereof, optionally wherein the gene product of interest and the GAPDH are expressed from the endogenous promoter of the GAPDH gene.

107. The iPSC of claim 106, wherein the iPSC's genome comprises a regulatory element that enables expression of GAPDH and the gene product of interest as separate gene products, optionally, wherein at least one of the gene products is a protein and the regulatory element enables expression of that protein separate from the other gene product.

108. The iPSC of claim 107, wherein the iPSC's genome comprises an IRES or 2A element located between the coding sequence of the GAPDH gene and the exogenous coding sequence for the gene product of interest.

109. The iPSC of any one of claims 106-108, wherein the iPSC's genome comprises a polyadenylation sequence, and optionally a 3′ UTR sequence, downstream of the exogenous coding sequence for the gene product of interest, wherein, if a 3′UTR sequence is present, the 3′UTR sequence is positioned 3′ of the exogenous coding sequence and 5′ of the polyadenylation sequence.

110. The iPSC of any one of claims 106-109, wherein the coding sequence of the GAPDH gene is less than 100% identical to an endogenous coding sequence of the GAPDH gene.

111. The iPSC of any one of claims 106-110, wherein the iPSC's genome does not comprise a reporter gene, e.g., a fluorescent reporter gene or an antibiotic resistance gene.

112. The iPSC of any one of claims 106-111, for use as a medicament.

113. The iPSC of any one of claims 106-112, for use in the treatment of a disease, disorder, or condition, e.g., a cancer.

114. A system for editing the genome of an iPSC in a population of iPSCs, the system comprising the population of iPSC, a nuclease that causes a break within an endogenous coding sequence of a GAPDH gene of the iPSC, and a donor template that comprises a knock-in cassette comprising a safety switch in frame with and downstream (3′) of an exogenous coding sequence or partial coding sequence of the GAPDH gene.

115. The system of claim 114, wherein the break is a double-strand break.

116. The system of any one of claims 114-115, wherein the break is located within the last exon of the GAPDH gene.

117. The system of any one of claims 114-116, wherein the nuclease is a CRISPR/Cas nuclease and the system further comprises a guide molecule for the CRISPR/Cas nuclease.

118. The system of any one of claims 114-116, wherein the nuclease is a zinc finger nuclease (ZFN), a transcription activator-like effector nuclease (TALEN) or a meganuclease.

119. The system of any one of claims 114-118, wherein the knock-in cassette comprises a regulatory element that enables expression of GAPDH and the gene product of interest as separate gene products, optionally, wherein at least one of the gene products is a protein and the regulatory element enables expression of that protein separate from the other gene product.

120. The system of claim 119, wherein the knock-in cassette comprises an IRES or 2A element located between the exogenous coding sequence or partial coding sequence of the GAPDH gene and the exogenous coding sequence for the gene product of interest.

121. The system of any one of claims 114-120, wherein the knock-in cassette comprises a polyadenylation sequence, and optionally a 3′ UTR sequence, downstream of the exogenous coding sequence for the gene product of interest, wherein, if a 3′UTR sequence is present, the 3′UTR sequence is positioned 3′ of the exogenous coding sequence and 5′ of the polyadenylation sequence.

122. The system of any one of claims 114-121, wherein the exogenous coding sequence or partial coding sequence of the GAPDH gene in the knock-in cassette is less than 100% identical to the corresponding endogenous coding sequence of the GAPDH gene of the iPSC.

123. The system of claim 122, wherein the exogenous coding sequence or partial coding sequence of the GAPDH gene in the knock-in cassette has been codon optimized relative to the corresponding endogenous coding sequence of the GAPDH gene of the iPSC to remove a target site of the DNA nuclease, and/or to reduce the likelihood of homologous recombination after integration of the knock-in cassette into the genome of the iPSC.

124. The system of claim 123, wherein the exogenous coding sequence or partial coding sequence of the GAPDH gene in the knock-in cassette does not comprise a target site for the nuclease.

125. A method of increasing the percentage of genetically modified mammalian cells with a desired genetic payload within a population of mammalian cells comprising:
creating a first population of mammalian cells by providing at least one donor nucleic acid construct comprising a specific genetic payload flanked by a first homologous region (HR) and a second HR, wherein the first and second HRs are essentially homologous to a first genomic region (GR) and a second GR, respectively, wherein the first GR and the second GR are adjacent to and flank a pre-determined genomic position in an exon of an essential gene in a mammalian cell,
providing a gene editing system containing a nuclease that is targeted to the pre-determined genomic position,
providing the at least one donor nucleic acid construct and the gene editing system into the first population of mammalian cells,
culturing the first population of mammalian cells, and
identifying the percentage of surviving cells that comprise the specific genetic payload,
creating a second population of mammalian cells by providing to the surviving cells from the first population of mammalian cells, a gene editing system containing a nuclease that is targeted to the pre-determined genomic position;
optionally reintroducing the at least one donor construct;
culturing the second population of mammalian cells; and
identifying the percentage of surviving cells that comprise the specific exogenous genetic payload,
wherein the percentage of surviving cells from the second population of mammalian cells that comprise the specific exogenous genetic payload is higher than the percentage of surviving cells from the first population of mammalian cells that comprise the specific exogenous genetic payload.

126. The method of claim 125 wherein a plurality of the surviving cells from the first population of mammalian cells that do not comprise the specific genetic payloads are killed during the creation of the second population of mammalian cells.

127. The method any one of claims 125-126 wherein a plurality of surviving cells from the first population of mammalian cells that do not comprise the specific genetic payloads incorporate the specific genetic payloads during the creation of the second population of mammalian cells.

128. The method of any one of claims 125-127 wherein the percentage of surviving cells from the second population of mammalian cells that comprise the specific genetic payloads is at least three (3) times larger than the percentage of surviving cells from the first population of mammalian cells that comprise the specific genetic payloads.

129. The method of any one of claims 125-128 wherein at least one of the donor nucleic acid constructs has a different genetic payload than at least one other donor nucleic acid constructs, and at least a plurality of the second population of mammalian cells incorporate each of the different genetic payloads.

130. The method of any one of claims 125-129 wherein the percentage of surviving cells from the second population of mammalian cells that do not comprise the specific genetic payloads is at least five (5) times lower than the percentage of surviving cells from the first population of mammalian cells that do not comprise the specific genetic payloads.

131. The method of any one of claims 125-130 wherein the at least one of the HR regions contains at least one mutation that prevents the cutting of the genetic payload at the nuclease cutting site.

132. The method of any one of claims 125-131 wherein identifying the percentage of surviving cells is accomplished using flow cytometry.

133. A population of cells made by the method of any one of claims 125-132.

134. The population of cells of claim 133, wherein the cells are pluripotent stem cells (PSCs).

135. The population of cells of claim 133, wherein the cells are induced pluripotent stem cells (iPSCs).

136. A cell from the population of cells of any one of claims 133-135 wherein the cell is differentiated into a differentiated cell.

137. The differentiated cell of claim 136, wherein the differentiated cell is selected from:
a cell in the immune system, optionally selected from a T cell, a T cell expressing a chimeric antigen receptor (CAR), a suppressive T cell, a myeloid cell, a dendritic cell, and a macrophage;
a cell in the nervous system, optionally selected from a dopaminergic neuron, a microglia cell, an oligodendrocyte, an astrocyte, a cortical neuron, a spinal or oculomotor neuron, an enteric neuron, a Placode-derived cell, a Schwann cell, and a trigeminal or sensory neuron;
a cell in the ocular system, optionally selected from a retinal pigment epithelial cell, a photoreceptor cone cell, a photoreceptor rod cell, a bipolar cell, and a ganglion cell;
a cell in the cardiovascular system, optionally selected from a cardiomyocyte, an endothelial cell, and a nodal cell; or
a cell in the metabolic system, optionally selected from a hepatocyte, a cholangiocyte, and a pancreatic beta cell.

138. An iPSC of claim 135, wherein the iPSC's genome comprises a regulatory element that enables expression of GAPDH and the gene product of interest as separate gene products, optionally, wherein at least one of the gene products is a protein and the regulatory element enables expression of that protein separate from the other gene product.

139. The iPSC of claim 138, wherein the iPSC's genome comprises an IRES or 2A element located between the coding sequence of the GAPDH gene and the exogenous coding sequence for the gene product of interest.

140. The iPSC of any one of claims 138-139, wherein the iPSC's genome comprises a polyadenylation sequence, and optionally a 3′ UTR sequence, downstream of the exogenous coding sequence for the gene product of interest, wherein, if a 3′UTR sequence is present, the 3′UTR sequence is positioned 3′ of the exogenous coding sequence and 5′ of the polyadenylation sequence.

141. The iPSC of any one of claims 138-140, wherein the coding sequence of the GAPDH gene is less than 100% identical to an endogenous coding sequence of the GAPDH gene.

142. The iPSC of any one of claims 138-141, wherein the iPSC's genome does not comprise a reporter gene, e.g., a fluorescent reporter gene or an antibiotic resistance gene.

143. The iPSC of any one of claims 138-142, for use as a medicament.

144. The iPSC of any one of claims 138-143, for use in the treatment of a disease, disorder, or condition, e.g., a cancer.

145. A method of editing the genome of a pluripotent stem cell or an iPS cell, the method comprising contacting the cell with:
a nuclease that causes a break within an endogenous coding sequence of an essential gene in the cell, wherein the essential gene encodes a gene product that is required for survival and/or proliferation of the cell, and
(ii) a donor template that comprises a knock-in cassette comprising an exogenous coding sequence for a gene product of interest in frame with and downstream (3′) of an exogenous coding sequence or partial coding sequence of the essential gene, wherein the knock-in cassette is integrated into the genome of the cell by homology-directed repair (HDR) of the break, resulting in a genome-edited cell that expresses:
(a) the gene product of interest, and
(b) the gene product encoded by the essential gene that is required for survival and/or proliferation of the cell, or a functional variant thereof.

146. The method of claim 145, wherein, if the knock-in cassette is not integrated into the genome of the cell by homology-directed repair (HDR) in the correct position or orientation, the cell no longer expresses the gene product encoded by the essential gene, or a functional variant thereof.

147. The method of claim 145 or 146, wherein the break is a double-strand break.

148. The method of any one of claims 145-147, wherein the break is located within the last 1000, 500, 400, 300, 200, 100, or 50 base pairs of the endogenous coding sequence of the essential gene.

149. The method of any one of claims 145-147, wherein the break is located within the last exon of the essential gene.

150. The method of any one of claims 145-149, wherein the nuclease is a CRISPR/Cas nuclease and the method further comprises contacting the cell with a guide molecule for the CRISPR/Cas nuclease.

151. The method of any one of claims 145-149, wherein the nuclease is a zinc finger nuclease (ZFN), a transcription activator-like effector nuclease (TALEN) or a meganuclease.

152. The method of any one of claims 145-151, wherein the donor template is a donor DNA template, optionally wherein the donor DNA template is double-stranded.

153. The method of claim 152, wherein the donor DNA template is a plasmid, optionally wherein the plasmid has not been linearized.

154. The method of any one of claims 145-153, wherein the donor template comprises homology arms on either side of the knock-in cassette.

155. The method of claim 154, wherein the homology arms correspond to sequences located on either side of the break in the genome of the cell.

156. The method of any one of claims 145-155, wherein the knock-in cassette comprises a regulatory element that enables expression of the gene product encoded by the essential gene and the gene product of interest as separate gene products, optionally, wherein at least one of the gene products is a protein and the regulatory element enables expression of that protein separate from the other gene product.

157. The method of claim 156, wherein the knock-in cassette comprises an IRES or 2A element located between the exogenous coding sequence or partial coding sequence of the essential gene and the exogenous coding sequence for the gene product of interest.

158. The method of claim 157, wherein the 2A element is a T2A element (EGRGSLLTCGDVEENPGP), a P2A element (ATNFSLLKQAGDVEENPGP), a E2A element (QCTNYALLKLAGDVESNPGP), or an F2A element (VKQTLNFDLLKLAGDVESNPGP).

159. The method of claim 157 or 158, wherein the knock-in cassette further comprises a sequence encoding a linker peptide upstream of the 2A element.

160. The method of claim 159, wherein the linker peptide comprises the amino acid sequence GSG.

161. The method of any one of claims 145-160, wherein the knock-in cassette comprises a polyadenylation sequence, and optionally a 3′ UTR sequence, downstream of the exogenous coding sequence for the gene product of interest, wherein, if a 3′UTR sequence is present, the 3′UTR sequence is positioned 3′ of the exogenous coding sequence and 5′ of the polyadenylation sequence.

162. The method of any one of claims 145-161, wherein the exogenous partial coding sequence of the essential gene in the knock-in cassette encodes a C-terminal fragment of a protein encoded by the essential gene.

163. The method of claim 162, wherein the C-terminal fragment is less than 500, 250, 150, 125, 100, 75, 50, 25, 20, 15 or 10 amino acids in length.

164. The method of claim 162 or 163, wherein the C-terminal fragment includes an amino acid sequence that is encoded by a region of the endogenous coding sequence of the essential gene that spans the break.

165. The method of any one of claims 145-164, wherein the exogenous coding sequence or partial coding sequence of the essential gene in the knock-in cassette is less than 100% identical to the corresponding endogenous coding sequence of the essential gene of the cell.

166. The method of claim 165, wherein the exogenous coding sequence or partial coding sequence of the essential gene in the knock-in cassette has been codon optimized relative to the corresponding endogenous coding sequence of the essential gene of the cell to prevent further binding of the nuclease to the target site, to reduce the likelihood of recombination after integration of the knock-in cassette into the genome of the cell, and/or to increase expression of the gene product of the essential gene and/or the gene product of interest after integration of the knock-in cassette into the genome of the cell.

167. The method of any one of claims 145-166, wherein the essential gene is a housekeeping gene, e.g., a gene listed in Table 3.

168. The method of any one of claims 145-166, wherein the cell is an iPS cell or ES cell and the essential gene is involved in differentiation of iPS or ES cells or expansion of iPS- or ES-derived cells, e.g., a gene listed in Table 4.

169. The method of claim 168, wherein the iPS-derived cells are iPS-derived NK cells or iPS-derived T cells.

170. The method of any one of claims 145-169, wherein the donor template does not comprise a reporter gene, e.g., a fluorescent reporter gene or an antibiotic resistance gene.

171. The method of any one of claims 145-170, wherein the gene product of interest is a chimeric antigen receptor (CAR), a non-naturally occurring variant of FcγRIII (CD16), an interleukin (e.g., interleukin 15 (IL-15), interleukin 15 receptor (IL-15R) or a variant thereof, interleukin 12 (IL-12), interleukin-12 receptor (IL-12R) or a variant thereof), a human leukocyte antigen (e.g., human leukocyte antigen G (HLA-G), human leukocyte antigen E (HLA-E)), leukocyte surface antigen cluster of differentiation CD47 (CD47), or any combination of two or more thereof.

172. A genetically modified pluripotent stem cell or iPS cell comprising a genome with an exogenous coding sequence for a gene product of interest in frame with and downstream (3′) of a coding sequence of an essential gene, wherein the essential gene encodes a gene product that is required for survival and/or proliferation of the cell.

173. An engineered pluripotent stem cell or iPS cell comprising a genomic modification, wherein the genomic modification comprises an insertion of an exogenous knock-in cassette within an endogenous coding sequence of an essential gene in the cell's genome, wherein the essential gene encodes a gene product that is required for survival and/or proliferation of the cell, wherein the knock-in cassette comprises an exogenous coding sequence for a gene product of interest in frame with and downstream (3′) of an exogenous coding sequence or partial coding sequence encoding the gene product of the essential gene, or a functional variant thereof, and wherein the cell expresses the gene product of interest and the gene product encoded by the essential gene that is required for survival and/or proliferation of the cell, or a functional variant thereof, optionally wherein the gene product of interest and the gene product encoded by the essential gene are expressed from the endogenous promoter of the essential gene.

174. The cell of claim 172 or 173, wherein the cell's genome comprises a regulatory element that enables expression of the gene product encoded by the essential gene and the gene product of interest as separate gene products, optionally, wherein at least one of the gene products is a protein and the regulatory element enables expression of that protein separate from the other gene product.

175. The cell of claim 174, wherein the cell's genome comprises an IRES or 2A element located between the coding sequence of the essential gene and the exogenous coding sequence for the gene product of interest.

176. The cell of any one of claims 172-175, wherein the cell's genome comprises a polyadenylation sequence, and optionally a 3′ UTR sequence, downstream of the exogenous coding sequence for the gene product of interest, wherein, if a 3′UTR sequence is present, the 3′UTR sequence is positioned 3′ of the exogenous coding sequence and 5′ of the polyadenylation sequence.

177. The cell of any one of claims 172-176, wherein the coding sequence of the essential gene is less than 100% identical to an endogenous coding sequence of the essential gene.

178. The cell of any one of claims 172-177, wherein the essential gene is a housekeeping gene, e.g., a gene listed in Table 3.

179. The cell of any one of claims 172-177, wherein the cell is an iPS cell or ES cell and the essential gene is involved in differentiation of iPS or ES cells or expansion of iPS- or ES-derived cells, e.g., a gene listed in Table 4.

180. The cell of claim 179, wherein the iPS-derived cells are iPS-derived NK cells or iPS-derived T cells.

181. The cell of any one of claims 172-180, wherein the cell's genome does not comprise a reporter gene, e.g., a fluorescent reporter gene or an antibiotic resistance gene.

182. The cell of any one of claims 172-181, wherein the gene product of interest is a chimeric antigen receptor (CAR), a non-naturally occurring variant of FcγRIII (CD16), interleukin 15 (IL-15), interleukin 15 receptor (IL-15R) or a variant thereof, interleukin 12 (IL-12), interleukin-12 receptor (IL-12R) or a variant thereof, human leukocyte antigen G (HLA-G), human leukocyte antigen E (HLA-E), leukocyte surface antigen cluster of differentiation CD47 (CD47), or any combination of two or more thereof.

183. The cell of any one of claims 172-182, for use as a medicament.

184. The cell of any one of claims 172-182, for use in the treatment of a disease, disorder, or condition, e.g., a cancer.

185. A cell, or population of cells, produced by the method of any one of claims 145-171 or progeny thereof.

186. A system for editing the genome of a pluripotent stem cell or an iPS cell, the system comprising the cell, a nuclease that causes a break within an endogenous coding sequence of an essential gene of the cell, wherein the essential gene encodes a gene product that is required for survival and/or proliferation of the cell, and a donor template that comprises a knock-in cassette comprising an exogenous coding sequence for a gene product of interest in frame with and downstream (3′) of an exogenous coding sequence or partial coding sequence of the essential gene.

187. The system of claim 186, wherein the break is a double-strand break.

188. The system of claim 186 or 187, wherein the break is located within the last 1000, 500, 400, 300, 200, 100 or 50 base pairs of the coding sequence of the essential gene.

189. The system of any one of claims 186-188, wherein the break is located within the last exon of the essential gene.

190. The system of any one of claims 186-189, wherein the nuclease is a CRISPR/Cas nuclease and the system further comprises a guide molecule for the CRISPR/Cas nuclease.

191. The system of any one of claims 186-189, wherein the nuclease is a zinc finger nuclease (ZFN), a transcription activator-like effector nuclease (TALEN) or a meganuclease.

192. The system of any one of claims 186-191, wherein the donor template is a donor DNA template, optionally wherein the donor DNA template is double-stranded.

193. The system of claim 192, wherein the donor DNA template is a plasmid, optionally wherein the plasmid has not been linearized.

194. The system of any one of claims 186-193, wherein the donor template comprises homology arms on either side of the knock-in cassette.

195. The system of claim 194, wherein the homology arms correspond to sequences located on either side of the break in the genome of the cell.

196. The system of any one of claims 186-195, wherein the knock-in cassette comprises a regulatory element that enables expression of the gene product encoded by the essential gene and the gene product of interest as separate gene products, optionally, wherein at least one of the gene products is a protein and the regulatory element enables expression of that protein separate from the other gene product.

197. The system of claim 196, wherein the knock-in cassette comprises an IRES or 2A element located between the exogenous coding sequence or partial coding sequence of the essential gene and the exogenous coding sequence for the gene product of interest.

198. The system of any one of claims 186-197, wherein the knock-in cassette comprises a polyadenylation sequence, and optionally a 3′ UTR sequence, downstream of the exogenous coding sequence for the gene product of interest, wherein, if a 3′UTR sequence is present, the 3′UTR sequence is positioned 3′ of the exogenous coding sequence and 5′ of the polyadenylation sequence.

199. The system of any one of claims 186-198, wherein the exogenous partial coding sequence of the essential gene in the knock-in cassette encodes a C-terminal fragment of a protein encoded by the essential gene.

200. The system of claim 199, wherein the C-terminal fragment is less than 500, 250, 150, 125, 100, 75, 50, 25, 20, 15 or 10 amino acids in length.

201. The system of claim 199 or 200, wherein the C-terminal fragment includes an amino acid sequence that is encoded by a region of the coding sequence of the essential gene that spans the break.

202. The system of any one of claims 186-201, wherein the exogenous coding sequence or partial coding sequence of the essential gene in the knock-in cassette is less than 100% identical to the corresponding endogenous coding sequence of the essential gene of the cell.

203. The system of claim 202, wherein the exogenous coding sequence or partial coding sequence of the essential gene in the knock-in cassette has been codon optimized relative to the corresponding endogenous coding sequence of the essential gene of the cell to prevent further binding of a nuclease to the target site, to reduce the likelihood of recombination after integration of the knock-in cassette into the genome of the cell, or to increase expression of the gene product of the essential gene and/or the gene product of interest after integration of the knock-in cassette into the genome of the cell.

204. The system of claim 203, wherein the exogenous coding sequence or partial coding sequence of the essential gene in the knock-in cassette does not comprise a target site for the nuclease.

205. The system of any one of claims 186-204, wherein the essential gene is a housekeeping gene, e.g., a gene listed in Table 3.

206. The system of any one of claims 186-205, wherein the cell is an iPS cell or ES cell and the essential gene is involved in differentiation of iPS or ES cells or expansion of iPS- or ES-derived cells, e.g., a gene listed in Table 4.

207. The system of claim 206, wherein the iPS-derived cells are iPS-derived NK cells or iPS-derived T cells.

208. The system of any one of claims 186-207, wherein the donor DNA template does not comprise a reporter gene, e.g., a fluorescent reporter gene or an antibiotic resistance gene.

209. The system of any one of claims 186-208, wherein the gene product of interest is a chimeric antigen receptor (CAR), a non-naturally occurring variant of FcγRIII (CD16), interleukin 15 (IL-15), interleukin 15 receptor (IL-15R) or a variant thereof, interleukin 12 (IL-12), interleukin-12 receptor (IL-12R) or a variant thereof, human leukocyte antigen G (HLA-G), human leukocyte antigen E (HLA-E), leukocyte surface antigen cluster of differentiation CD47 (CD47), or any combination of two or more thereof.

210. A donor template for use in editing the genome of a pluripotent stem cell or an iPS cell, the donor template comprising a knock-in cassette with an exogenous coding sequence for a gene product of interest in frame with and downstream (3′) of an exogenous coding sequence or partial coding sequence of an essential gene, wherein the essential gene encodes a gene product that is required for survival and/or proliferation of a pluripotent stem cell or an iPS cell.

211. The donor template of claim 210, wherein the knock-in cassette is integrated into the genome of the cell by homology-directed repair (HDR).

212. The donor template of claim 210 or 211, wherein the donor template is a donor DNA template, optionally wherein the donor DNA template is double-stranded.

213. The donor template of any one of claims 210-212, wherein the donor DNA template is a plasmid, optionally wherein the plasmid has not been linearized.

214. The donor template of any one of claims 210-213, wherein the donor template comprises homology arms on either side of the knock-in cassette.

215. The donor template of any one of claims 210-214, wherein the knock-in cassette comprises a regulatory element that enables expression of the gene product encoded by the essential gene and the gene product of interest as separate gene products, optionally, wherein at least one of the gene products is a protein and the regulatory element enables expression of that protein separate from the other gene product.

216. The donor template of claim 215, wherein the knock-in cassette comprises an IRES or 2A element located between the exogenous coding sequence or partial coding sequence of the essential gene and the exogenous coding sequence for the gene product of interest.

217. The donor template of any one of claims 210-216, wherein the knock-in cassette comprises a polyadenylation sequence, and optionally a 3′ UTR sequence, downstream of the exogenous coding sequence for the gene product of interest, wherein, if a 3′UTR sequence is present, the 3′UTR sequence is positioned 3′ of the exogenous coding sequence and 5′ of the polyadenylation sequence.

218. The donor template of any one of claims 210-217, wherein the exogenous partial coding sequence of the essential gene in the knock-in cassette encodes a C-terminal fragment of a protein encoded by the endogenous coding sequence of the essential gene.

219. The donor template of claim 218, wherein the C-terminal fragment is less than 500, 250, 150, 125, 100, 75, 50, 25, 20, 15 or 10 amino acids in length.

220. The donor template of any one of claims 210-219, wherein the exogenous coding sequence or partial coding sequence of the essential gene in the knock-in cassette is less than 100% identical to the corresponding endogenous coding sequence of the essential gene.

221. The donor template of claim 220, wherein the exogenous coding sequence or partial coding sequence of the essential gene in the knock-in cassette has been codon optimized relative to the corresponding endogenous coding sequence of the essential gene to prevent further binding of a nuclease to the target site, to reduce the likelihood of recombination after integration of the knock-in cassette into a genome of a cell, or to increase expression of the gene product of the essential gene and/or the gene product of interest after integration of the knock-in cassette into a genome of a cell.

222. The donor template of claim 221, wherein the exogenous coding sequence or partial coding sequence of the essential gene in the knock-in cassette does not comprise a target site for a nuclease.

223. The donor template of any one of claims 210-222, wherein the essential gene is a housekeeping gene, e.g., a gene listed in Table 3.

224. The donor template of any one of claims 210-223, wherein the cell is an iPS cell or ES cell and the essential gene is involved in differentiation of iPS or ES cells or expansion of iPS- or ES-derived cells, e.g., a gene listed in Table 4.

225. The donor template of any one of claims 210-224, wherein the donor template does not comprise a reporter gene, e.g., a fluorescent reporter gene or an antibiotic resistance gene.

226. The donor template of any one of claims 210-225, wherein the gene product of interest is a chimeric antigen receptor (CAR), a non-naturally occurring variant of FcγRIII (CD16), interleukin 15 (IL-15), interleukin 15 receptor (IL-15R) or a variant thereof, interleukin 12 (IL-12), interleukin-12 receptor (IL-12R) or a variant thereof, human leukocyte antigen G (HLA-G), human leukocyte antigen E (HLA-E), leukocyte surface antigen cluster of differentiation CD47 (CD47), or any combination of two or more thereof.

The application's sequence listing, which the Patent Office published only in electronic form, follows.

SEQUENCE LISTING (1907 sequences)

SEQ ID NO: 1 - DNA, 555 bp, Artificial Sequence
  Description of Artificial Sequence: Synthetic polynucleotide
gaagactgtggatggcccctccgggaaactgtggcgtgatggccgcggggctctccagaacatcatccctgcctctactggcgctgccaaggctgtgggcaaggtcatccctgagctgaacgggaagctcactggcatggccttccgtgtccccactgccaacgtgtcagtggtggacctgacctgccgtctagaaaaacctgccaaatatgatgacatcaagaaggtggtgaagcaggcgtcggagggccccctcaagggcatcctgggctacactgagcaccaggtggtctcctctgacttcaacagcgacacccactcctccacctttgacgctggggctggcattgccctcaacgaccactttgtcaagctcatttcctggtatgtggctggggccagagactggctcttaaaaagtgcagggtctggcgccctctggtggctggctcagaaaaagggccctgacaactctttacatcttctaggtatgacaacgagttcggatatagcaatagagtggtcgatctgatggctcatatggctagcaaagag

SEQ ID NO: 2 - DNA, 621 bp, Artificial Sequence
  Description of Artificial Sequence: Synthetic polynucleotide
gaagactgtggatggcccctccgggaaactgtggcgtgatggccgcggggctctccagaacatcatccctgcctctactggcgctgccaaggctgtgggcaaggtcatccctgagctgaacgggaagctcactggcatggccttccgtgtccccactgccaacgtgtcagtggtggacctgacctgccgtctagaaaaacctgccaaatatgatgacatcaagaaggtggtgaagcaggcgtcggagggccccctcaagggcatcctgggctacactgagcaccaggtggtctcctctgacttcaacagcgacacccactcctccacctttgacgctggggctggcattgccctcaacgaccactttgtcaagctcatttcctggtatgtggctggggccagagactggctcttaaaaagtgcagggtctggcgccctctggtggctggctcagaaaaagggccctgacaactctttacatcttctaggtatgacaacgagttcggatatagcaatagagtggtcgatctgatggctcatatggctagcaaagagggaagcggagctactaacttcagcctgctgaagcaggctggagacgtggaggagaaccctggacct

SEQ ID NO: 3 - DNA, 567 bp, Artificial Sequence
  Description of Artificial Sequence: Synthetic polynucleotide
ggctttcccataatttcctttcaaggtggggagggaggtagaggggtgatgtggggagtacgctgcagggcctcactccttttgcagaccacagtccatgccatcactgccacccagaagactgtggatggcccctccgggaaactgtggcgtgatggccgcggggctctccagaacatcatccctgcctctactggcgctgccaaggctgtgggcaaggtcatccctgagctgaacgggaagctcactggcatggccttccgtgtccccactgccaacgtgtcagtggtggacctgacctgccgtctagaaaaacctgccaaatatgatgacatcaagaaggtggtgaagcaggcgtcggagggccccctcaagggcatcctgggctacactgagcaccaggtggtctcctctgacttcaacagcgacacccactcctccacctttgacgctggggctggcattgccctcaacgaccactttgtcaagctcatctcttggtacgacaatgagttcggatatagcaatagagtggtcgatctgatggctcatatggctagcaaagag

SEQ ID NO: 4 - DNA, 500 bp, Artificial Sequence
  Description of Artificial Sequence: Synthetic polynucleotide
atttggctacagcaacagggtggtggacctcatggcccacatggcctccaaggagtaagacccctggaccaccagccccagcaagagcacaagaggaagagagagaccctcactgctggggagtccctgccacactcagtcccccaccacactgaatctcccctcctcacagttgccatgtagaccccttgaagaggggaggggcctagggagccgcaccttgtcatgtaccatcaataaagtaccctgtgctcaaccagttacttgtcctgtcttattctagggtctggggcagaggggagggaagctgggcttgtgtcaaggtgagacattcttgctggggagggacctggtatgttctcctcagactgagggtagggcctccaaacagccttgcttgcttcgagaaccatttgcttcccgctcagacgtcttgagtgctacaggaagctggcaccactacttcagagaacaaggccttttcctctcctcgctccagt

SEQ ID NO: 5 - DNA, 500 bp, Artificial Sequence
  Description of Artificial Sequence: Synthetic polynucleotide
agactggctcttaaaaagtgcagggtctggcgccctctggtggctggctcagaaaaagggccctgacaactcttttcatcttctaggtatgacaacgaatttggctacagcaacagggtggtggacctcatggcccacatggcctccaaggagtaagacccctggaccaccagccccagcaagagcacaagaggaagagagagaccctcactgctggggagtccctgccacactcagtcccccaccacactgaatctcccctcctcacagttgccatgtagaccccttgaagaggggaggggcctagggagccgcaccttgtcatgtaccatcaataaagtaccctgtgctcaaccagttacttgtcctgtcttattctagggtctggggcagaggggagggaagctgggcttgtgtcaaggtgagacattcttgctggggagggacctggtatgttctcctcagactgagggtagggcctccaaacagccttgcttgct

SEQ ID NO: 6 - DNA, 562 bp, Artificial Sequence
  Description of Artificial Sequence: Synthetic polynucleotide
gcagacttccatttacagtgaggaggtgagcattgcattgaacaaaagatggcgttttcacttggaattagttatctgaagctttaggattcctcagcaatatgattatgagacaagaaaggaagattcagaaatgagtctagttgaaggcagcaattcagagaagaagattcagttgttatcattgccgtcctgcttggtttatggcctggttcaggaccaaggagagaagtgtgaatacatgcctcttgagctatagaatgagacgctggagtcactaagatgattttttaaaagtattgttttataaacaaaaataagattgtgacaagggattccactattaatgttttcatgcctgtgccttaatctgactgggtatggtgagaattgtgcttgcagctttaaggtaagaattttaccatcttaatatgttaagaagtgccatttcagtctctcatctctactccaacttgtcttcttaggtgctaaagtcagagccgaaatctacgaggccttcgagaacatctaccccatcctgaagggcttcagaaagaccacc

SEQ ID NO: 7 - DNA, 580 bp, Artificial Sequence
  Description of Artificial Sequence: Synthetic polynucleotide
ctgaccacagctctgcaagcagacttccatttacagtgaggaggtgagcattgcattgaacaaaagatggcgttttcacttggaattagttatctgaagctttaggattcctcagcaatatgattatgagacaagaaaggaagattcagaaatgagtctagttgaaggcagcaattcagagaagaagattcagttgttatcattgccgtcctgcttggtttatggcctggttcaggaccaaggagagaagtgtgaatacatgcctcttgagctatagaatgagacgctggagtcactaagatgattttttaaaagtattgttttataaacaaaaataagattgtgacaagggattccactattaatgttttcatgcctgtgccttaatctgactgggtatggtgagaattgtgcttgcagctttaaggtaagaattttaccatcttaatatgttaagaagtgccatttcagtctctcatctctactccaacttgtcttcttaggggctaaagtgcgggccgagatctacgaggccttcgagaatatctaccccatcctgaagggcttcagaaagaccacc

SEQ ID NO: 8 - DNA, 521 bp, Artificial Sequence
  Description of Artificial Sequence: Synthetic polynucleotide
acaaaagatggcgttttcacttggaattagttatctgaagctttaggattcctcagcaatatgattatgagacaagaaaggaagattcagaaatgagtctagttgaaggcagcaattcagagaagaagattcagttgttatcattgccgtcctgcttggtttatggcctggttcaggaccaaggagagaagtgtgaatacatgcctcttgagctatagaatgagacgctggagtcactaagatgattttttaaaagtattgttttataaacaaaaataagattgtgacaagggattccactattaatgttttcatgcctgtgccttaatctgactgggtatggtgagaattgtgcttgcagctttaaggtaagaattttaccatcttaatatgttaagaagtgccatttcagtctctcatctctactccaacttgtcttcttaggtgctaaagtcagagcagaaatttatgaagcattcgagaacatctaccctattctaaagggattcaggaagacgacg

SEQ ID NO: 9 - DNA, 500 bp, Artificial Sequence
  Description of Artificial Sequence: Synthetic polynucleotide
cagaaatttatgaagcatttgaaaacatctaccctattctaaagggattcaggaagacgacgtaatggctctcatgtacccttgcctcccccacccccttctttttttttttttaaacaaatcagtttgttttggtacctttaaatggtggtgttgtgagaagatggatgttgagttgcagggtgtggcaccaggtgatgcccttctgtaagtgcccaccgcgggatgccgggaaggggcattatttgtgcactgagaacaccgcgcagcgtgactgtgagttgctcataccgtgctgctatctgggcagcgctgcccatttatttatatgtagattttaaacactgctgttgacaagttggtttgagggagaaaactttaagtgttaaagccacctctataattgattggactttttaattttaatgtttttccccatgaaccacagtttttatatttctaccagaaaagtaaaaatcttttttaaaagtgttgttttt

SEQ ID NO: 10 - DNA, 500 bp, Artificial Sequence
  Description of Artificial Sequence: Synthetic polynucleotide
taggtgctaaagtcagagcagaaatttatgaagcatttgaaaacatctaccctattctaaagggattcaggaagacgacgtaatggctctcatgtacccttgcctcccccacccccttctttttttttttttaaacaaatcagtttgttttggtacctttaaatggtggtgttgtgagaagatggatgttgagttgcagggtgtggcaccaggtgatgcccttctgtaagtgcccaccgcgggatgccgggaaggggcattatttgtgcactgagaacaccgcgcagcgtgactgtgagttgctcataccgtgctgctatctgggcagcgctgcccatttatttatatgtagattttaaacactgctgttgacaagttggtttgagggagaaaactttaagtgttaaagccacctctataattgattggactttttaattttaatgtttttccccatgaaccacagtttttatatttctaccagaaaagtaaaaatcttt

SEQ ID NO: 11 - DNA, 500 bp, Artificial Sequence
  Description of Artificial Sequence: Synthetic polynucleotide
aagggattcaggaagacgacgtaatggctctcatgtacccttgcctcccccacccccttctttttttttttttaaacaaatcagtttgttttggtacctttaaatggtggtgttgtgagaagatggatgttgagttgcagggtgtggcaccaggtgatgcccttctgtaagtgcccaccgcgggatgccgggaaggggcattatttgtgcactgagaacaccgcgcagcgtgactgtgagttgctcataccgtgctgctatctgggcagcgctgcccatttatttatatgtagattttaaacactgctgttgacaagttggtttgagggagaaaactttaagtgttaaagccacctctataattgattggactttttaattttaatgtttttccccatgaaccacagtttttatatttctaccagaaaagtaaaaatcttttttaaaagtgttgtttttctaatttataactcctaggggttatttctgtgccagacaca

SEQ ID NO: 12 - DNA, 522 bp, Artificial Sequence
  Description of Artificial Sequence: Synthetic polynucleotide
ggcccgggggactccacatggtggcaggcagtggcatcagcaagacactctctccctcacagaacgtgaagctccctgacgcctatgagcgcctcatcctggacgtcttctgcgggagccagatgcacttcgtgcgcaggtgaggcccagctgccggcccctgcatacctgtgggctatggggtggcctttgccctccctccctgtgtgccaccggcctcccaagccataccatgtcccctcagcgacgagctccgtgaggcctggcgtattttcaccccactgctgcaccagattgagctggagaagcccaagcccatcccctatatttatggcaggtgaggaaagggtgggggctggggacagagcccagcgggcaggggcggggtgagggtggagctacctcatgcctctcctccacccgtcactctccagccgaggccccacggaggcagacgagctgatgaagagagtgggcttccagtacgagggaacctacaaatgggtcaaccctcacaagctg

SEQ ID NO: 13 - DNA, 500 bp, Artificial Sequence
  Description of Artificial Sequence: Synthetic polynucleotide
gtgggtgaacccccacaagctctgagccctgggcacccacctccacccccgccacggccaccctccttcccgccgcccgaccccgagtcgggaggactccgggaccattgacctcagctgcacattcctggccccgggctctggccaccctggcccgcccctcgctgctgctactacccgagcccagctacattcctcagctgccaagcactcgagaccatcctggcccctccagaccctgcctgagcccaggagctgagtcacctcctccactcactccagcccaacagaaggaaggaggagggcgcccattcgtctgtcccagagcttattggccactgggtctcactcctgagtggggccagggtgggagggagggacgagggggaggaaaggggcgagcacccacgtgagagaatctgcctgtggccttgcccgccagcctcagtgccacttgacattccttgtcaccagcaacatctcgagccccctggatgtcc

SEQ ID NO: 14 - DNA, 587 bp, Artificial Sequence
  Description of Artificial Sequence: Synthetic polynucleotide
ccagggggctgtagtggggccaggctggacctctgtgccctgagcatggctttcttgtttttcagttttggaactccccaaagagctgtcagaaatctttgatcccacacgaggtaggctgctgcattcctccctgaggctaggggtaagggacacagctcattgggtcctatggctgttttcttgcccttttgaggaccttgttgtggcgcttatggtaactggggcaaagggtgaagttcctgatgggcaggtggggttccctttcctgggctttggtgggtggagaggtgggagctggaatgttagtaactgagctccctccattcccagagtgcatgagctcggagctgctggaggagttgatgtcctcagaaggtgggtggccctggaaggtgggagtgggtgtgggcaggggttgggctgctgctaggggagccctggcccagggcctgagactagtgctctctgcagtgttcgcccctctgctgagactttctcctcctcctggcgaccacgactacatctacaacctggacgagagcgagggcgtgtgcgacctgtttgatgtgcccgtgctgaacctg

SEQ ID NO: 15 - DNA, 568 bp, Artificial Sequence
  Description of Artificial Sequence: Synthetic polynucleotide
ccaggctggacctctgtgccctgagcatggctttcttgtttttcagttttggaactccccaaagagctgtcagaaatctttgatcccacacgaggtaggctgctgcattcctccctgaggctaggggtaagggacacagctcattgggtcctatggctgttttcttgcccttttgaggaccttgttgtggcgcttatggtaactggggcaaagggtgaagttcctgatgggcaggtggggttccctttcctgggctttggtgggtggagaggtgggagctggaatgttagtaactgagctccctccattcccagagtgcatgagctcggagctgctggaggagttgatgtcctcagaaggtgggtggccctggaaggtgggagtgggtgtgggcaggggttgggctgctgctaggggagccctggcccagggcctgagactagtgctctctgcagtgtttgcccctctgcttcgtcttagtcctcctccgggcgaccacgactacatctacaacctggacgagagcgagggcgtgtgcgacctgtttgatgtgcccgtgctgaacctg

SEQ ID NO: 16 - DNA, 500 bp, Artificial Sequence
  Description of Artificial Sequence: Synthetic polynucleotide
gtcagaaatctttgatcccacacgaggtaggctgctgcattcctccctgaggctaggggtaagggacacagctcattgggtcctatggctgttttcttgcccttttgaggaccttgttgtggcgcttatggtaactggggcaaagggtgaagttcctgatgggcaggtggggttccctttcctgggctttggtgggtggagaggtgggagctggaatgttagtaactgagctccctccattcccagagtgcatgagctcggagctgctggaggagttgatgtcctcagaaggtgggtggccctggaaggtgggagtgggtgtgggcaggggttgggctgctgctaggggagccctggcccagggcctgagactagtgctctctgcagtgtttgcccctctgcttcgtctttctccacccccgggagaccacgattatatctacaacctggacgagagtgaaggtgtctgtgacctcttcgacgtgcccgtgctcaacctc

SEQ ID NO: 17 - DNA, 500 bp, Artificial Sequence
  Description of Artificial Sequence: Synthetic polynucleotide
ccacccccgggagaccacgattatatctacaacctggacgagagtgaaggtgtctgtgacctctttgatgtgcctgttctcaacctctgactgacagggacatgccctgtgtggctgggacccagactgtctgacctgggggttgcctggggacctctcccacccgacccctacagagcttgagagccacagacgcctggcttctccggcctcccctcaccgcacagttctggccacagctcccgctcctgtgctggcacttctgtgctcgcagagcaggggaacaggactcagcccccatcaccgtggagccaaagtgtttgcttctccctttctgcggccttcgccagcccaggctcggctgccacccagtggcacagaaccgaggagctgccattaccccccatagggggcagtgtcttgttcctgccagcctcagtgtcttgcttctgccagctccttcccctaggagggaagggtggggtggaactgggcacatg

SEQ ID NO: 18 - DNA, 500 bp, Artificial Sequence
  Description of Artificial Sequence: Synthetic polynucleotide
attatatctacaacctggacgagagtgaaggtgtctgtgacctctttgatgtgcctgttctcaacctctgactgacagggacatgccctgtgtggctgggacccagactgtctgacctgggggttgcctggggacctctcccacccgacccctacagagcttgagagccacagacgcctggcttctccggcctcccctcaccgcacagttctggccacagctcccgctcctgtgctggcacttctgtgctcgcagagcaggggaacaggactcagcccccatcaccgtggagccaaagtgtttgcttctccctttctgcggccttcgccagcccaggctcggctgccacccagtggcacagaaccgaggagctgccattaccccccatagggggcagtgtcttgttcctgccagcctcagtgtcttgcttctgccagctccttcccctaggagggaagggtggggtggaactgggcacatgccagcaccacttctagctt

SEQ ID NO: 19 - DNA, 500 bp, Artificial Sequence
  Description of Artificial Sequence: Synthetic polynucleotide
tgactgacagggacatgccctgtgtggctgggacccagactgtctgacctgggggttgcctggggacctctcccacccgacccctacagagcttgagagccacagacgcctggcttctccggcctcccctcaccgcacagttctggccacagctcccgctcctgtgctggcacttctgtgctcgcagagcaggggaacaggactcagcccccatcaccgtggagccaaagtgtttgcttctccctttctgcggccttcgccagcccaggctcggctgccacccagtggcacagaaccgaggagctgccattaccccccatagggggcagtgtcttgttcctgccagcctcagtgtcttgcttctgccagctccttcccctaggagggaagggtggggtggaactgggcacatgccagcaccacttctagcttccttcgctatcccccaccccctgaccctccagctcctcctggccctctcacgtgcccacttctgctgg

SEQ ID NO: 20 - DNA, 626 bp, Artificial Sequence
  Description of Artificial Sequence: Synthetic polynucleotide
agagcagggtttcttgacagcagtgctattggcattttaaactggataattctttgttgtgatgggctttcctgtggactgtactatgttggtacacaagaaaaacagtgtactatgtgaatactcactcaaagccagtagcactccctgattgtaacaccaaaaaagtctctcagcattgccaaatgtcccctgtggcagcagaatcactccctgatgagaaccactaccctggagtaaaatctataactatgtcttagaaaataacacagaaaattaatatttctttcactctactccttccattagtgatcaaataaagaaggcatttggcgctacttgccaaattgttggctcaaacttgtgctgaaccttttttggttttctacacttaagtttttttgcctataacccagagaactttgaaaatagagtgtagttaatgtgtatctaatgttactttgtattgacttaatttaccggcctttaatccacagcataagaagtcccacggcaaggacaaagagaaccggggcatcaacacactggaacggtccaaggtcgaggaaacaaccgagcacctggtcaccaagagcagactgcctctgagagcccagatcaacctg

SEQ ID NO: 21 - DNA, 558 bp, Artificial Sequence
  Description of Artificial Sequence: Synthetic polynucleotide
ttcctgtggactgtactatgttggtacacaagaaaaacagtgtactatgtgaatactcactcaaagccagtagcactccctgattgtaacaccaaaaaagtctctcagcattgccaaatgtcccctgtggcagcagaatcactccctgatgagaaccactaccctggagtaaaatctataactatgtcttagaaaataacacagaaaattaatatttctttcactctactccttccattagtgatcaaataaagaaggcatttggcgctacttgccaaattgttggctcaaacttgtgctgaaccttttttggttttctacacttaagtttttttgcctataacccagagaactttgaaaatagagtgtagttaatgtgtatctaatgttactttgtattgacttaattttcccgccttaaatccacagcataaaaaatcacatggaaaagacaaagaaaacagaggcattaacacactggagaggtctaaagtggaagaaacaaccgagcacctggtcaccaagagcagactgcctctgagagcccagatcaacctg

SEQ ID NO: 22 - DNA, 590 bp, Artificial Sequence
  Description of Artificial Sequence: Synthetic polynucleotide
ttaaactggataattctttgttgtgatgggctttcctgtggactgtactatgttggtacacaagaaaaacagtgtactatgtgaatactcactcaaagccagtagcactccctgattgtaacaccaaaaaagtctctcagcattgccaaatgtcccctgtggcagcagaatcactccctgatgagaaccactaccctggagtaaaatctataactatgtcttagaaaataacacagaaaattaatatttctttcactctactccttccattagtgatcaaataaagaaggcatttggcgctacttgccaaattgttggctcaaacttgtgctgaaccttttttggttttctacacttaagtttttttgcctataacccagagaactttgaaaatagagtgtagttaatgtgtatctaatgttactttgtattgacttaattttcccgccttaaatccacagcataaaaaatcacatggaaaagacaaagaaaacagaggcatcaacacactggaacggtccaaggtcgaggaaacaaccgagcacctggtcaccaagagcagactgcctctgagagcccagatcaacctg

SEQ ID NO: 23 - DNA, 500 bp, Artificial Sequence
  Description of Artificial Sequence: Synthetic polynucleotide
aaaaaatcacatggaaaagacaaagaaaacagaggcattaacacactggagaggtctaaagtggaagaaactacagagcacttggttacaaagagcagattacctctgcgagcccagatcaacctttaattcacttgggggttggcaattttatttttaaagaaaacttaaaaataaaacctgaaaccccagaacttgagccttgtgtatagattttaaaagaatatatatatcagccgggcgcggtggctcatgcctgtaatcccagcactttgggaggctgaggcgggtggattgcttgagcccaggagtttgagaccagcctggccaacgtggcaaaacctcgtctctgttaaaaattagccgggcgtggtggcacactcctgtaatcccagctactggggaggctgaggcacgagaatcacttgaacccaggaagcggggttgcagtgagccaaaggtacaccactacactccagcctgggcaacagagcaagact

SEQ ID NO: 24 - DNA, 500 bp, Artificial Sequence
  Description of Artificial Sequence: Synthetic polynucleotide
aactacagagcacttggctacatagagcagattacctctgcgagcccagatcaacctttaattcacttgggggttggcaattttatttttaaagaaaacttaaaaataaaacctgaaaccccagaacttgagccttgtgtatagattttaaaagaatatatatatcagccgggcgcggtggctcatgcctgtaatcccagcactttgggaggctgaggcgggtggattgcttgagcccaggagtttgagaccagcctggccaacgtggcaaaacctcgtctctgttaaaaattagccgggcgtggtggcacactcctgtaatcccagctactggggaggctgaggcacgagaatcacttgaacccaggaagcggggttgcagtgagccaaaggtacaccactacactccagcctgggcaacagagcaagactcggtctcaaaaacaaaatttaaaaaagatataaggcagtactgtaaattcagttgaattttgatatct

SEQ ID NO: 25 - DNA, 500 bp, Artificial Sequence
  Description of Artificial Sequence: Synthetic polynucleotide
attaacacactggagagttctgaagtggaagaaactacagagcacttggttacaaagagcagattacctctgcgagcccagatcaacctttaattcacttgggggttggcaattttatttttaaagaaaacttaaaaataaaacctgaaaccccagaacttgagccttgtgtatagattttaaaagaatatatatatcagccgggcgcggtggctcatgcctgtaatcccagcactttgggaggctgaggcgggtggattgcttgagcccaggagtttgagaccagcctggccaacgtggcaaaacctcgtctctgttaaaaattagccgggcgtggtggcacactcctgtaatcccagctactggggaggctgaggcacgagaatcacttgaacccaggaagcggggttgcagtgagccaaaggtacaccactacactccagcctgggcaacagagcaagactcggtctcaaaaacaaaatttaaaaaagatataaggc

SEQ ID NO: 26 - DNA, 51 bp, Artificial Sequence
  Description of Artificial Sequence: Synthetic oligonucleotide
gcggccgcgtcgagtctagagggcccgtttaaacccgctgatcagcctcga

SEQ ID NO: 27 - DNA, 122 bp, Artificial Sequence
  Description of Artificial Sequence: Synthetic polynucleotide
aacttgtttattgcagcttataatggttacaaataaagcaatagcatcacaaatttcacaaataaagcatttttttcactgcattctagttgtggtttgtccaaactcatcaatgtatctta

SEQ ID NO: 28 - DNA, 225 bp, Artificial Sequence
  Description of Artificial Sequence: Synthetic polynucleotide
ctgtgccttctagttgccagccatctgttgtttgcccctcccccgtgccttccttgaccctggaaggtgccactcccactgtcctttcctaataaaatgaggaaattgcatcgcattgtctgagtaggtgtcattctattctggggggtggggtggggcaggacagcaagggggaggattgggaagacaatagcaggcatgctggggatgcggtgggctctatgg

SEQ ID NO: 29 - protein, 18 aa, Thosea asigna virus
EGRGSLLTCGDVEENPGP

SEQ ID NO: 30 - protein, 19 aa, Porcine teschovirus
ATNFSLLKQAGDVEENPGP

SEQ ID NO: 31 - protein, 20 aa, Equine rhinitis A virus
QCTNYALLKLAGDVESNPGP

SEQ ID NO: 32 - protein, 22 aa, Foot-and-mouth disease virus
VKQTLNFDLLKLAGDVESNPGP

SEQ ID NO: 33 - DNA, 54 bp, Thosea asigna virus
gagggcagaggaagtcttctaacatgcggtgacgtggaggagaatcctggcccg

SEQ ID NO: 34 - DNA, 66 bp, Porcine teschovirus
ggaagcggagctactaacttcagcctgctgaagcaggctggagacgtggaggagaaccctggacct

SEQ ID NO: 35 - DNA, 60 bp, Equine rhinitis A virus
cagtgtactaattatgctctcttgaaattggctggagatgttgagagcaaccctggacct

SEQ ID NO: 36 - DNA, 66 bp, Foot-and-mouth disease virus
gtgaaacagactttgaattttgaccttctcaagttggcgggagacgtggagtccaaccctggacct

SEQ ID NO: 37 - DNA, 574 bp, Artificial Sequence
  Description of Artificial Sequence: Synthetic polynucleotide
cccctctccctcccccccccctaacgttactggccgaagccgcttggaataaggccggtgtgcgtttgtctatatgttattttccaccatattgccgtcttttggcaatgtgagggcccggaaacctggccctgtcttcttgacgagcattcctaggggtctttcccctctcgccaaaggaatgcaaggtctgttgaatgtcgtgaaggaagcagttcctctggaagcttcttgaagacaaacaacgtctgtagcgaccctttgcaggcagcggaaccccccacctggcgacaggtgcctctgcggccaaaagccacgtgtataagatacacctgcaaaggcggcacaaccccagtgccacgttgtgagttggatagttgtggaaagagtcaaatggctctcctcaagcgtattcaacaaggggctgaaggatgcccagaaggtaccccattgtatgggatctgatctggggcctcggtgcacatgctttacatgtgtttagtcgaggttaaaaaaacgtctaggccccccgaaccacggggacgtggttttcctttgaaaaacacgatgataa

SEQ ID NO: 38 - DNA, 2867 bp, Artificial Sequence
  Description of Artificial Sequence: Synthetic polynucleotide
gaagactgtggatggcccctccgggaaactgtggcgtgatggccgcggggctctccagaacatcatccctgcctctactggcgctgccaaggctgtgggcaaggtcatccctgagctgaacgggaagctcactggcatggccttccgtgtccccactgccaacgtgtcagtggtggacctgacctgccgtctagaaaaacctgccaaatatgatgacatcaagaaggtggtgaagcaggcgtcggagggccccctcaagggcatcctgggctacactgagcaccaggtggtctcctctgacttcaacagcgacacccactcctccacctttgacgctggggctggcattgccctcaacgaccactttgtcaagctcatttcctggtatgtggctggggccagagactggctcttaaaaagtgcagggtctggcgccctctggtggctggctcagaaaaagggccctgacaactctttacatcttctaggtatgacaacgagttcggatatagcaatagagtggtcgatctgatggctcatatggctagcaaagaggagggcagaggaagtcttctaacatgcggtgacgtggaggagaatcctggcccgatggtgagcaagggcgaggagctgttcaccggggtggtgcccatcctggtcgagctggacggcgacgtaaacggccacaagttcagcgtgtccggcgagggcgagggcgatgccacctacggcaagctgaccctgaagttcatctgcaccaccggcaagctgcccgtgccctggcccaccctcgtgaccaccctgacctacggcgtgcagtgcttcagccgctaccccgaccacatgaagcagcacgacttcttcaagtccgccatgcccgaaggctacgtccaggagcgcaccatcttcttcaaggacgacggcaactacaagacccgcgccgaggtgaagttcgagggcgacaccctggtgaaccgcatcgagctgaagggcatcgacttcaaggaggacggcaacatcctggggcacaagctggagtacaactacaacagccacaacgtctatatcatggccgacaagcagaagaacggcatcaaggtgaacttcaagatccgccacaacatcgaggacggcagcgtgcagctcgccgaccactaccagcagaacacccccatcggcgacggccccgtgctgctgcccgacaaccactacctgagcacccagtccgccctgagcaaagaccccaacgagaagcgcgatcacatggtcctgctggagttcgtgaccgccgccgggatcactctcggcatggacgagctgtacaaggagggcagaggaagtcttctaacatgcggtgacgtggaggagaatcctggcccgatggtgagcaagggcgaggaggataacatggccatcatcaaggagttcatgcgcttcaaggtgcacatggagggctccgtgaacggccacgagttcgagatcgagggcgagggcgagggccgcccctacgagggcacccagaccgccaagctgaaggtgaccaagggtggccccctgcccttcgcctgggacatcctgtcccctcagttcatgtacggctccaaggcctacgtgaagcaccccgccgacatccccgactacttgaagctgtccttccccgagggcttcaagtgggagcgcgtgatgaacttcgaggacggcggcgtggtgaccgtgacccaggactcctccctgcaggacggcgagttcatctacaaggtgaagctgcgcggcaccaacttcccctccgacggccccgtaatgcagaagaagacaatgggctgggaggcctcctccgagcggatgtaccccgaggacggcgccctgaagggcgagatcaagcagaggctgaagctgaaggacggcggccactacgacgctgaggtcaagaccacctacaaggccaagaagcccgtgcagctgcccggcgcctacaacgtcaacatcaagttggacatcacctcccacaacgaggactacaccatcgtggaacagtacgaacgcgccgagggccgccactccaccggcggcatggacgagctgtacaagtaagcggccgcgtcgagtctagagggcccgtttaaacccgctgatcagcctcgactgtgccttctagttgccagccatctgttgtttgcccctcccccgtgccttccttgaccctggaaggtgccactcccactgtcctttcctaataaaatgaggaaattgcatcgcattgtctgagtaggtgtcattctattctggggggtggggtggggcaggacagcaagggggaggattgggaagacaatagcaggcatgctggggatgcggtgggctctatggatttggctacagcaacagggtggtggacctcatggcccacatggcctccaaggagtaagacccctggaccaccagccccagcaagagcacaagaggaagagagagaccctcactgctggggagtccctgccacactcagtcccccaccacactgaatctcccctcctcacagttgccatgtagaccccttgaagaggggaggggcctagggagccgcaccttgtcatgtaccatcaataaagtaccctgtgctcaaccagttacttgtcctgtcttattctagggtctggggcagaggggagggaagctgggcttgtgtcaaggtgagacattcttgctggggagggacctggtatgttctcctcagactgagggtagggcctccaaacagccttgcttgcttcgagaaccatttgcttcccgctcagacgtcttgagtgctacaggaagctggcaccactacttcagagaacaaggccttttcctctcctcgctccagt

SEQ ID NO: 39 - DNA, 3402 bp, Artificial Sequence
  Description of Artificial Sequence: Synthetic polynucleotide
gaagactgtggatggcccctccgggaaactgtggcgtgatggccgcggggctctccagaacatcatccctgcctctactggcgctgccaaggctgtgggcaaggtcatccctgagctgaacgggaagctcactggcatggccttccgtgtccccactgccaacgtgtcagtggtggacctgacctgccgtctagaaaaacctgccaaatatgatgacatcaagaaggtggtgaagcaggcgtcggagggccccctcaagggcatcctgggctacactgagcaccaggtggtctcctctgacttcaacagcgacacccactcctccacctttgacgctggggctggcattgccctcaacgaccactttgtcaagctcatttcctggtatgtggctggggccagagactggctcttaaaaagtgcagggtctggcgccctctggtggctggctcagaaaaagggccctgacaactctttacatcttctaggtatgacaacgagttcggatatagcaatagagtggtcgatctgatggctcatatggctagcaaagagggaagcggagctactaacttcagcctgctgaagcaggctggagacgtggaggagaaccctggacctatggtgagcaagggcgaggagctgttcaccggggtggtgcccatcctggtcgagctggacggcgacgtaaacggccacaagttcagcgtgtccggcgagggcgagggcgatgccacctacggcaagctgaccctgaagttcatctgcaccaccggcaagctgcccgtgccctggcccaccctcgtgaccaccctgacctacggcgtgcagtgcttcagccgctaccccgaccacatgaagcagcacgacttcttcaagtccgccatgcccgaaggctacgtccaggagcgcaccatcttcttcaaggacgacggcaactacaagacccgcgccgaggtgaagttcgagggcgacaccctggtgaaccgcatcgagctgaagggcatcgacttcaaggaggacggcaacatcctggggcacaagctggagtacaactacaacagccacaacgtctatatcatggccgacaagcagaagaacggcatcaaggtgaacttcaagatccgccacaacatcgaggacggcagcgtgcagctcgccgaccactaccagcagaacacccccatcggcgacggccccgtgctgctgcccgacaaccactacctgagcacccagtccgccctgagcaaagaccccaacgagaagcgcgatcacatggtcctgctggagttcgtgaccgccgccgggatcactctcggcatggacgagctgtacaagtaacccctctccctcccccccccctaacgttactggccgaagccgcttggaataaggccggtgtgcgtttgtctatatgttattttccaccatattgccgtcttttggcaatgtgagggcccggaaacctggccctgtcttcttgacgagcattcctaggggtctttcccctctcgccaaaggaatgcaaggtctgttgaatgtcgtgaaggaagcagttcctctggaagcttcttgaagacaaacaacgtctgtagcgaccctttgcaggcagcggaaccccccacctggcgacaggtgcctctgcggccaaaagccacgtgtataagatacacctgcaaaggcggcacaaccccagtgccacgttgtgagttggatagttgtggaaagagtcaaatggctctcctcaagcgtattcaacaaggggctgaaggatgcccagaaggtaccccattgtatgggatctgatctggggcctcggtgcacatgctttacatgtgtttagtcgaggttaaaaaaacgtctaggccccccgaaccacggggacgtggttttcctttgaaaaacacgatgataaatggtgagcaagggcgaggaggataacatggccatcatcaaggagttcatgcgcttcaaggtgcacatggagggctccgtgaacggccacgagttcgagatcgagggcgagggcgagggccgcccctacgagggcacccagaccgccaagctgaaggtgaccaagggtggccccctgcccttcgcctgggacatcctgtcccctcagttcatgtacggctccaaggcctacgtgaagcaccccgccgacatccccgactacttgaagctgtccttccccgagggcttcaagtgggagcgcgtgatgaacttcgaggacggcggcgtggtgaccgtgacccaggactcctccctgcaggacggcgagttcatctacaaggtgaagctgcgcggcaccaacttcccctccgacggccccgtaatgcagaagaagacaatgggctgggaggcctcctccgagcggatgtaccccgaggacggcgccctgaagggcgagatcaagcagaggctgaagctgaaggacggcggccactacgacgctgaggtcaagaccacctacaaggccaagaagcccgtgcagctgcccggcgcctacaacgtcaacatcaagttggacatcacctcccacaacgaggactacaccatcgtggaacagtacgaacgcgccgagggccgccactccaccggcggcatggacgagctgtacaagtaagcggccgcgtcgagtctagagggcccgtttaaacccgctgatcagcctcgactgtgccttctagttgccagccatctgttgtttgcccctcccccgtgccttccttgaccctggaaggtgccactcccactgtcctttcctaataaaatgaggaaattgcatcgcattgtctgagtaggtgtcattctattctggggggtggggtggggcaggacagcaagggggaggattgggaagacaatagcaggcatgctggggatgcggtgggctctatggatttggctacagcaacagggtggtggacctcatggcccacatggcctccaaggagtaagacccctggaccaccagccccagcaagagcacaagaggaagagagagaccctcactgctggggagtccctgccacactcagtcccccaccacactgaatctcccctcctcacagttgccatgtagaccccttgaagaggggaggggcctagggagccgcaccttgtcatgtaccatcaataaagtaccctgtgctcaaccagttacttgtcctgtcttattctagggtctggggcagaggggagggaagctgggcttgtgtcaaggtgagacattcttgctggggagggacctggtatgttctcctcagactgagggtagggcctccaaacagccttgcttgcttcgagaaccatttgcttcccgctcagacgtcttgagtgctacaggaagctggcaccactacttcagagaacaaggccttttcctctcctcgctccagt

SEQ ID NO: 40 - DNA, 2891 bp, Artificial Sequence
  Description of Artificial Sequence: Synthetic polynucleotide
gaagactgtggatggcccctccgggaaactgtggcgtgatggccgcggggctctccagaacatcatccctgcctctactggcgctgccaaggctgtgggcaaggtcatccctgagctgaacgggaagctcactggcatggccttccgtgtccccactgccaacgtgtcagtggtggacctgacctgccgtctagaaaaacctgccaaatatgatgacatcaagaaggtggtgaagcaggcgtcggagggccccctcaagggcatcctgggctacactgagcaccaggtggtctcctctgacttcaacagcgacacccactcctccacctttgacgctggggctggcattgccctcaacgaccactttgtcaagctcatttcctggtatgtggctggggccagagactggctcttaaaaagtgcagggtctggcgccctctggtggctggctcagaaaaagggccctgacaactctttacatcttctaggtatgacaacgagttcggatatagcaatagagtggtcgatctgatggctcatatggctagcaaagagggaagcggagctactaacttcagcctgctgaagcaggctggagacgtggaggagaaccctggacctatggtgagcaagggcgaggagctgttcaccggggtggtgcccatcctggtcgagctggacggcgacgtaaacggccacaagttcagcgtgtccggcgagggcgagggcgatgccacctacggcaagctgaccctgaagttcatctgcaccaccggcaagctgcccgtgccctggcccaccctcgtgaccaccctgacctacggcgtgcagtgcttcagccgctaccccgaccacatgaagcagcacgacttcttcaagtccgccatgcccgaaggctacgtccaggagcgcaccatcttcttcaaggacgacggcaactacaagacccgcgccgaggtgaagttcgagggcgacaccctggtgaaccgcatcgagctgaagggcatcgacttcaaggaggacggcaacatcctggggcacaagctggagtacaactacaacagccacaacgtctatatcatggccgacaagcagaagaacggcatcaaggtgaacttcaagatccgccacaacatcgaggacggcagcgtgcagctcgccgaccactaccagcagaacacccccatcggcgacggccccgtgctgctgcccgacaaccactacctgagcacccagtccgccctgagcaaagaccccaacgagaagcgcgatcacatggtcctgctggagttcgtgaccgccgccgggatcactctcggcatggacgagctgtacaagggaagcggagctactaacttcagcctgctgaagcaggctggagacgtggaggagaaccctggacctatggtgagcaagggcgaggaggataacatggccatcatcaaggagttcatgcgcttcaaggtgcacatggagggctccgtgaacggccacgagttcgagatcgagggcgagggcgagggccgcccctacgagggcacccagaccgccaagctgaaggtgaccaagggtggccccctgcccttcgcctgggacatcctgtcccctcagttcatgtacggctccaaggcctacgtgaagcaccccgccgacatccccgactacttgaagctgtccttccccgagggcttcaagtgggagcgcgtgatgaacttcgaggacggcggcgtggtgaccgtgacccaggactcctccctgcaggacggcgagttcatctacaaggtgaagctgcgcggcaccaacttcccctccgacggccccgtaatgcagaagaagacaatgggctgggaggcctcctccgagcggatgtaccccgaggacggcgccctgaagggcgagatcaagcagaggctgaagctgaaggacggcggccactacgacgctgaggtcaagaccacctacaaggccaagaagcccgtgcagctgcccggcgcctacaacgtcaacatcaagttggacatcacctcccacaacgaggactacaccatcgtggaacagtacgaacgcgccgagggccgccactccaccggcggcatggacgagctgtacaagtaagcggccgcgtcgagtctagagggcccgtttaaacccgctgatcagcctcgactgtgccttctagttgccagccatctgttgtttgcccctcccccgtgccttccttgaccctggaaggtgccactcccactgtcctttcctaataaaatgaggaaattgcatcgcattgtctgagtaggtgtcattctattctggggggtggggtggggcaggacagcaagggggaggattgggaagacaatagcaggcatgctggggatgcggtgggctctatggatttggctacagcaacagggtggtggacctcatggcccacatggcctccaaggagtaagacccctggaccaccagccccagcaagagcacaagaggaagagagagaccctcactgctggggagtccctgccacactcagtcccccaccacactgaatctcccctcctcacagttgccatgtagaccccttgaagaggggaggggcctagggagccgcaccttgtcatgtaccatcaataaagtaccctgtgctcaaccagttacttgtcctgtcttattctagggtctggggcagaggggagggaagctgggcttgtgtcaaggtgagacattcttgctggggagggacctggtatgttctcctcagactgagggtagggcctccaaacagccttgcttgcttcgagaaccatttgcttcccgctcagacgtcttgagtgctacaggaagctggcaccactacttcagagaacaaggccttttcctctcctcgctccagt

SEQ ID NO: 41 - DNA, 2879 bp, Artificial Sequence
  Description of Artificial Sequence: Synthetic polynucleotide
gaagactgtggatggcccctccgggaaactgtggcgtgatggccgcggggctctccagaacatcatccctgcctctactggcgctgccaaggctgtgggcaaggtcatccctgagctgaacgggaagctcactggcatggccttccgtgtccccactgccaacgtgtcagtggtggacctgacctgccgtctagaaaaacctgccaaatatgatgacatcaagaaggtggtgaagcaggcgtcggagggccccctcaagggcatcctgggctacactgagcaccaggtggtctcctctgacttcaacagcgacacccactcctccacctttgacgctggggctggcattgccctcaacgaccactttgtcaagctcatttcctggtatgtggctggggccagagactggctcttaaaaagtgcagggtctggcgccctctggtggctggctcagaaaaagggccctgacaactctttacatcttctaggtatgacaacgagttcggatatagcaatagagtggtcgatctgatggctcatatggctagcaaagagggaagcggagctactaacttcagcctgctgaagcaggctggagacgtggaggagaaccctggacctatggtgagcaagggcgaggagctgttcaccggggtggtgcccatcctggtcgagctggacggcgacgtaaacggccacaagttcagcgtgtccggcgagggcgagggcgatgccacctacggcaagctgaccctgaagttcatctgcaccaccggcaagctgcccgtgccctggcccaccctcgtgaccaccctgacctacggcgtgcagtgcttcagccgctaccccgaccacatgaagcagcacgacttcttcaagtccgccatgcccgaaggctacgtccaggagcgcaccatcttcttcaaggacgacggcaactacaagacccgcgccgaggtgaagttcgagggcgacaccctggtgaaccgcatcgagctgaagggcatcgacttcaaggaggacggcaacatcctggggcacaagctggagtacaactacaacagccacaacgtctatatcatggccgacaagcagaagaacggcatcaaggtgaacttcaagatccgccacaacatcgaggacggcagcgtgcagctcgccgaccactaccagcagaacacccccatcggcgacggccccgtgctgctgcccgacaaccactacctgagcacccagtccgccctgagcaaagaccccaacgagaagcgcgatcacatggtcctgctggagttcgtgaccgccgccgggatcactctcggcatggacgagctgtacaaggagggcagaggaagtcttctaacatgcggtgacgtggaggagaatcctggcccgatggtgagcaagggcgaggaggataacatggccatcatcaaggagttcatgcgcttcaaggtgcacatggagggctccgtgaacggccacgagttcgagatcgagggcgagggcgagggccgcccctacgagggcacccagaccgccaagctgaaggtgaccaagggtggccccctgcccttcgcctgggacatcctgtcccctcagttcatgtacggctccaaggcctacgtgaagcaccccgccgacatccccgactacttgaagctgtccttccccgagggcttcaagtgggagcgcgtgatgaacttcgaggacggcggcgtggtgaccgtgacccaggactcctccctgcaggacggcgagttcatctacaaggtgaagctgcgcggcaccaacttcccctccgacggccccgtaatgcagaagaagacaatgggctgggaggcctcctccgagcggatgtaccccgaggacggcgccctgaagggcgagatcaagcagaggctgaagctgaaggacggcggccactacgacgctgaggtcaagaccacctacaaggccaagaagcccgtgcagctgcccggcgcctacaacgtcaacatcaagttggacatcacctcccacaacgaggactacaccatcgtggaacagtacgaacgcgccgagggccgccactccaccggcggcatggacgagctgtacaagtaagcggccgcgtcgagtctagagggcccgtttaaacccgctgatcagcctcgactgtgccttctagttgccagccatctgttgtttgcccctcccccgtgccttccttgaccctggaaggtgccactcccactgtcctttcctaataaaatgaggaaattgcatcgcattgtctgagtaggtgtcattctattctggggggtggggtggggcaggacagcaagggggaggattgggaagacaatagcaggcatgctggggatgcggtgggctctatggatttggctacagcaacagggtggtggacctcatggcccacatggcctccaaggagtaagacccctggaccaccagccccagcaagagcacaagaggaagagagagaccctcactgctggggagtccctgccacactcagtcccccaccacactgaatctcccctcctcacagttgccatgtagaccccttgaagaggggaggggcctagggagccgcaccttgtcatgtaccatcaataaagtaccctgtgctcaaccagttacttgtcctgtcttattctagggtctggggcagaggggagggaagctgggcttgtgtcaaggtgagacattcttgctggggagggacctggtatgttctcctcagactgagggtagggcctccaaacagccttgcttgcttcgagaaccatttgcttcccgctcagacgtcttgagtgctacaggaagctggcaccactacttcagagaacaaggccttttcctctcctcgctccagt

SEQ ID NO: 42 - DNA, 2879 bp, Artificial Sequence
  Description of Artificial Sequence: Synthetic polynucleotide
gaagactgtggatggcccctccgggaaactgtggcgtgatggccgcggggctctccagaacatcatccctgcctctactggcgctgccaaggctgtgggcaaggtcatccctgagctgaacgggaagctcactggcatggccttccgtgtccccactgccaacgtgtcagtggtggacctgacctgccgtctagaaaaacctgccaaatatgatgacatcaagaaggtggtgaagcaggcgtcggagggccccctcaagggcatcctgggctacactgagcaccaggtggtctcctctgacttcaacagcgacacccactcctccacctttgacgctggggctggcattgccctcaacgaccactttgtcaagctcatttcctggtatgtggctggggccagagactggctcttaaaaagtgcagggtctggcgccctctggtggctggctcagaaaaagggccctgacaactctttacatcttctaggtatgacaacgagttcggatatagcaatagagtggtcgatctgatggctcatatggctagcaaagaggagggcagaggaagtcttctaacatgcggtgacgtggaggagaatcctggcccgatggtgagcaagggcgaggagctgttcaccggggtggtgcccatcctggtcgagctggacggcgacgtaaacggccacaagttcagcgtgtccggcgagggcgagggcgatgccacctacggcaagctgaccctgaagttcatctgcaccaccggcaagctgcccgtgccctggcccaccctcgtgaccaccctgacctacggcgtgcagtgcttcagccgctaccccgaccacatgaagcagcacgacttcttcaagtccgccatgcccgaaggctacgtccaggagcgcaccatcttcttcaaggacgacggcaactacaagacccgcgccgaggtgaagttcgagggcgacaccctggtgaaccgcatcgagctgaagggcatcgacttcaaggaggacggcaacatcctggggcacaagctggagtacaactacaacagccacaacgtctatatcatggccgacaagcagaagaacggcatcaaggtgaacttcaagatccgccacaacatcgaggacggcagcgtgcagctcgccgaccactaccagcagaacacccccatcggcgacggccccgtgctgctgcccgacaaccactacctgagcacccagtccgccctgagcaaagaccccaacgagaagcgcgatcacatggtcctgctggagttcgtgaccgccgccgggatcactctcggcatggacgagctgtacaagggaagcggagctactaacttcagcctgctgaagcaggctggagacgtggaggagaaccctggacctatggtgagcaagggcgaggaggataacatggccatcatcaaggagttcatgcgcttcaaggtgcacatggagggctccgtgaacggccacgagttcgagatcgagggcgagggcgagggccgcccctacgagggcacccagaccgccaagctgaaggtgaccaagggtggccccctgcccttcgcctgggacatcctgtcccctcagttcatgtacggctccaaggcctacgtgaagcaccccgccgacatccccgactacttgaagctgtccttccccgagggcttcaagtgggagcgcgtgatgaacttcgaggacggcggcgtggtgaccgtgacccaggactcctccctgcaggacggcgagttcatctacaaggtgaagctgcgcggcaccaacttcccctccgacggccccgtaatgcagaagaagacaatgggctgggaggcctcctccgagcggatgtaccccgaggacggcgccctgaagggcgagatcaagcagaggctgaagctgaaggacggcggccactacgacgctgaggtcaagaccacctacaaggccaagaagcccgtgcagctgcccggcgcctacaacgtcaacatcaagttggacatcacctcccacaacgaggactacaccatcgtggaacagtacgaacgcgccgagggccgccactccaccggcggcatggacgagctgtacaagtaagcggccgcgtcgagtctagagggcccgtttaaacccgctgatcagcctcgactgtgccttctagttgccagccatctgttgtttgcccctcccccgtgccttccttgaccctggaaggtgccactcccactgtcctttcctaataaaatgaggaaattgcatcgcattgtctgagtaggtgtcattctattctggggggtggggtggggcaggacagcaagggggaggattgggaagacaatagcaggcatgctggggatgcggtgggctctatggatttggctacagcaacagggtggtggacctcatggcccacatggcctccaaggagtaagacccctggaccaccagccccagcaagagcacaagaggaagagagagaccctcactgctggggagtccctgccacactcagtcccccaccacactgaatctcccctcctcacagttgccatgtagaccccttgaagaggggaggggcctagggagccgcaccttgtcatgtaccatcaataaagtaccctgtgctcaaccagttacttgtcctgtcttattctagggtctggggcagaggggagggaagctgggcttgtgtcaaggtgagacattcttgctggggagggacctggtatgttctcctcagactgagggtagggcctccaaacagccttgcttgcttcgagaaccatttgcttcccgctcagacgtcttgagtgctacaggaagctggcaccactacttcagagaacaaggccttttcctctcctcgctccagt

SEQ ID NO: 43 - DNA, 3390 bp, Artificial Sequence
  Description of Artificial Sequence: Synthetic polynucleotide
gaagactgtggatggcccctccgggaaactgtggcgtgatggccgcggggctctccagaacatcatccctgcctctactggcgctgccaaggctgtgggcaaggtcatccctgagctgaacgggaagctcactggcatggccttccgtgtccccactgccaacgtgtcagtggtggacctgacctgccgtctagaaaaacctgccaaatatgatgacatcaagaaggtggtgaagcaggcgtcggagggccccctcaagggcatcctgggctacactgagcaccaggtggtctcctctgacttcaacagcgacacccactcctccacctttgacgctggggctggcattgccctcaacgaccactttgtcaagctcatttcctggtatgtggctggggccagagactggctcttaaaaagtgcagggtctggcgccctctggtggctggctcagaaaaagggccctgacaactctttacatcttctaggtatgacaacgagttcggatatagcaatagagtggtcgatctgatggctcatatggctagcaaagaggagggcagaggaagtcttctaacatgcggtgacgtggaggagaatcctggcccgatggtgagcaagggcgaggagctgttcaccggggtggtgcccatcctggtcgagctggacggcgacgtaaacggccacaagttcagcgtgtccggcgagggcgagggcgatgccacctacggcaagctgaccctgaagttcatctgcaccaccggcaagctgcccgtgccctggcccaccctcgtgaccaccctgacctacggcgtgcagtgcttcagccgctaccccgaccacatgaagcagcacgacttcttcaagtccgccatgcccgaaggctacgtccaggagcgcaccatcttcttcaaggacgacggcaactacaagacccgcgccgaggtgaagttcgagggcgacaccctggtgaaccgcatcgagctgaagggcatcgacttcaaggaggacggcaacatcctggggcacaagctggagtacaactacaacagccacaacgtctatatcatggccgacaagcagaagaacggcatcaaggtgaacttcaagatccgccacaacatcgaggacggcagcgtgcagctcgccgaccactaccagcagaacacccccatcggcgacggccccgtgctgctgcccgacaaccactacctgagcacccagtccgccctgagcaaagaccccaacgagaagcgcgatcacatggtcctgctggagttcgtgaccgccgccgggatcactctcggcatggacgagctgtacaagtaacccctctccctcccccccccctaacgttactggccgaagccgcttggaataaggccggtgtgcgtttgtctatatgttattttccaccatattgccgtcttttggcaatgtgagggcccggaaacctggccctgtcttcttgacgagcattcctaggggtctttcccctctcgccaaaggaatgcaaggtctgttgaatgtcgtgaaggaagcagttcctctggaagcttcttgaagacaaacaacgtctgtagcgaccctttgcaggcagcggaaccccccacctggcgacaggtgcctctgcggccaaaagccacgtgtataagatacacctgcaaaggcggcacaaccccagtgccacgttgtgagttggatagttgtggaaagagtcaaatggctctcctcaagcgtattcaacaaggggctgaaggatgcccagaaggtaccccattgtatgggatctgatctggggcctcggtgcacatgctttacatgtgtttagtcgaggttaaaaaaacgtctaggccccccgaaccacggggacgtggttttcctttgaaaaacacgatgataaatggtgagcaagggcgaggaggataacatggccatcatcaaggagttcatgcgcttcaaggtgcacatggagggctccgtgaacggccacgagttcgagatcgagggcgagggcgagggccgcccctacgagggcacccagaccgccaagctgaaggtgaccaagggtggccccctgcccttcgcctgggacatcctgtcccctcagttcatgtacggctccaaggcctacgtgaagcaccccgccgacatccccgactacttgaagctgtccttccccgagggcttcaagtgggagcgcgtgatgaacttcgaggacggcggcgtggtgaccgtgacccaggactcctccctgcaggacggcgagttcatctacaaggtgaagctgcgcggcaccaacttcccctccgacggccccgtaatgcagaagaagacaatgggctgggaggcctcctccgagcggatgtaccccgaggacggcgccctgaagggcgagatcaagcagaggctgaagctgaaggacggcggccactacgacgctgaggtcaagaccacctacaaggccaagaagcccgtgcagctgcccggcgcctacaacgtcaacatcaagttggacatcacctcccacaacgaggactacaccatcgtggaacagtacgaacgcgccgagggccgccactccaccggcggcatggacgagctgtacaagtaagcggccgcgtcgagtctagagggcccgtttaaacccgctgatcagcctcgactgtgccttctagttgccagccatctgttgtttgcccctcccccgtgccttccttgaccctggaaggtgccactcccactgtcctttcctaataaaatgaggaaattgcatcgcattgtctgagtaggtgtcattctattctggggggtggggtggggcaggacagcaagggggaggattgggaagacaatagcaggcatgctggggatgcggtgggctctatggatttggctacagcaacagggtggtggacctcatggcccacatggcctccaaggagtaagacccctggaccaccagccccagcaagagcacaagaggaagagagagaccctcactgctggggagtccctgccacactcagtcccccaccacactgaatctcccctcctcacagttgccatgtagaccccttgaagaggggaggggcctagggagccgcaccttgtcatgtaccatcaataaagtaccctgtgctcaaccagttacttgtcctgtcttattctagggtctggggcagaggggagggaagctgggcttgtgtcaaggtgagacattcttgctggggagggacctggtatgttctcctcagactgagggtagggcctccaaacagccttgcttgcttcgagaaccatttgcttcccgctcagacgtcttgagtgctacaggaagctggcaccactacttcagagaacaaggccttttcctctcctcgctccagt

SEQ ID NO: 44 - DNA, 2117 bp, Artificial Sequence
  Description of Artificial Sequence: Synthetic polynucleotide
gaagactgtggatggcccctccgggaaactgtggcgtgatggccgcggggctctccagaacatcatccctgcctctactggcgctgccaaggctgtgggcaaggtcatccctgagctgaacgggaagctcactggcatggccttccgtgtccccactgccaacgtgtcagtggtggacctgacctgccgtctagaaaaacctgccaaatatgatgacatcaagaaggtggtgaagcaggcgtcggagggccccctcaagggcatcctgggctacactgagcaccaggtggtctcctctgacttcaacagcgacacccactcctccacctttgacgctggggctggcattgccctcaacgaccactttgtcaagctcatttcctggtatgtggctggggccagagactggctcttaaaaagtgcagggtctggcgccctctggtggctggctcagaaaaagggccctgacaactctttacatcttctaggtatgacaacgagttcggatatagcaatagagtggtcgatctgatggctcatatggctagcaaagagggaagcggagctactaacttcagcctgctgaagcaggctggagacgtggaggagaaccctggacctatggtgagcaagggcgaggagctgttcaccggggtggtgcccatcctggtcgagctggacggcgacgtaaacggccacaagttcagcgtgtccggcgagggcgagggcgatgccacctacggcaagctgaccctgaagttcatctgcaccaccggcaagctgcccgtgccctggcccaccctcgtgaccaccctgacctacggcgtgcagtgcttcagccgctaccccgaccacatgaagcagcacgacttcttcaagtccgccatgcccgaaggctacgtccaggagcgcaccatcttcttcaaggacgacggcaactacaagacccgcgccgaggtgaagttcgagggcgacaccctggtgaaccgcatcgagctgaagggcatcgacttcaaggaggacggcaacatcctggggcacaagctggagtacaactacaacagccacaacgtctatatcatggccgacaagcagaagaacggcatcaaggtgaacttcaagatccgccacaacatcgaggacggcagcgtgcagctcgccgaccactaccagcagaacacccccatcggcgacggccccgtgctgctgcccgacaaccactacctgagcacccagtccgccctgagcaaagaccccaacgagaagcgcgatcacatggtcctgctggagttcgtgaccgccgccgggatcactctcggcatggacgagctgtacaagtgagcggccgcgtcgagtctagagggcccgtttaaacccgctgatcagcctcgactgtgccttctagttgccagccatctgttgtttgcccctcccccgtgccttccttgaccctggaaggtgccactcccactgtcctttcctaataaaatgaggaaattgcatcgcattgtctgagtaggtgtcattctattctggggggtggggtggggcaggacagcaagggggaggattgggaagacaatagcaggcatgctggggatgcggtgggctctatggatttggctacagcaacagggtggtggacctcatggcccacatggcctccaaggagtaagacccctggaccaccagccccagcaagagcacaagaggaagagagagaccctcactgctggggagtccctgccacactcagtcccccaccacactgaatctcccctcctcacagttgccatgtagaccccttgaagaggggaggggcctagggagccgcaccttgtcatgtaccatcaataaagtaccctgtgctcaaccagttacttgtcctgtcttattctagggtctggggcagaggggagggaagctgggcttgtgtcaaggtgagacattcttgctggggagggacctggtatgttctcctcagactgagggtagggcctccaaacagccttgcttgcttcgagaaccatttgcttcccgctcagacgtcttgagtgctacaggaagctggcaccactacttcagagaacaaggccttttcctctcctcgctccagt

SEQ ID NO: 45 - DNA, 2585 bp, Artificial Sequence
  Description of Artificial Sequence: Synthetic polynucleotide
gaagactgtggatggcccctccgggaaactgtggcgtgatggccgcggggctctccagaacatcatccctgcctctactggcgctgccaaggctgtgggcaaggtcatccctgagctgaacgggaagctcactggcatggccttccgtgtccccactgccaacgtgtcagtggtggacctgacctgccgtctagaaaaacctgccaaatatgatgacatcaagaaggtggtgaagcaggcgtcggagggccccctcaagggcatcctgggctacactgagcaccaggtggtctcctctgacttcaacagcgacacccactcctccacctttgacgctggggctggcattgccctcaacgaccactttgtcaagctcatttcctggtatgtggctggggccagagactggctcttaaaaagtgcagggtctggcgccctctggtggctggctcagaaaaagggccctgacaactctttacatcttctaggtatgacaacgagttcggatatagcaatagagtggtcgatctgatggctcatatggctagcaaagagggaagcggagctactaacttcagcctgctgaagcaggctggagacgtggaggagaaccctggacctatggattggacctggatcctgtttctggtggccgctgccacaagagtgcacagcaattgggtcaacgtgatcagcgacctgaagaagatcgaggacctgatccagagcatgcacatcgacgccacactgtacaccgagtccgatgtgcaccctagctgcaaagtgaccgccatgaagtgctttctgctggaactgcaagtgatcagcctggaaagcggcgacgccagcatccacgataccgtggaaaacctgatcatcctggccaacaacagcctgagcagcaacggcaatgtgaccgagagcggctgcaaagagtgcgaggaactggaagagaagaacatcaaagagttcctccagagcttcgtccacatcgtgcagatgttcatcaacaccagctctggcggaggaagcggaggcggaggatctggtggtggtggatctggcggcggtggtagtggcggaggttctctgcaaatcacctgtcctccacctatgagcgtggaacacgccgacatctgggtcaagagctacagcctgtacagcagagagcggtacatctgcaacagcggcttcaagagaaaggccggcacaagcagcctgaccgagtgtgtgctgaacaaggccacaaacgtggcccactggaccacacctagcctgaagtgcatcagagatcccgctctggttcatcagaggcctgcccctccatctacagtgacaacagctggcgtgacccctcagcctgagtctctgtctccatctggaaaagagcctgccgccagctctcccagctctaacaatactgctgccaccacagccgctatcgtgcctggatctcagctgatgcctagcaagagccctagcaccggcacaacagagatcagctctcacgagagcagccacggaacaccttctcagaccaccgccaagaattgggagctgacagcctctgcctctcatcagccacctggcgtgtacccacagggccactctgatacaacagtggccatcagcaccagcaccgttctgctgtgtggcctgtctgctgttagcctgctggcctgctacctgaagtctagacagacacctcctctggccagcgtggaaatggaagccatggaagctctgcctgtcacatggggcaccagcagcagagatgaggacctcgagaattgcagccaccacctgtaggcggccgcgtcgagtctagagggcccgtttaaacccgctgatcagcctcgactgtgccttctagttgccagccatctgttgtttgcccctcccccgtgccttccttgaccctggaaggtgccactcccactgtcctttcctaataaaatgaggaaattgcatcgcattgtctgagtaggtgtcattctattctggggggtggggtggggcaggacagcaagggggaggattgggaagacaatagcaggcatgctggggatgcggtgggctctatggatttggctacagcaacagggtggtggacctcatggcccacatggcctccaaggagtaagacccctggaccaccagccccagcaagagcacaagaggaagagagagaccctcactgctggggagtccctgccacactcagtcccccaccacactgaatctcccctcctcacagttgccatgtagaccccttgaagaggggaggggcctagggagccgcaccttgtcatgtaccatcaataaagtaccctgtgctcaaccagttacttgtcctgtcttattctagggtctggggcagaggggagggaagctgggcttgtgtcaaggtgagacattcttgctggggagggacctggtatgttctcctcagactgagggtagggcctccaaacagccttgcttgcttcgagaaccatttgcttcccgctcagacgtcttgagtgctacaggaagctggcaccactacttcagagaacaaggccttttcctctcctcgctccagt

SEQ ID NO: 46 - DNA, 2129 bp, Artificial Sequence
  Description of Artificial Sequence: Synthetic polynucleotide
ggctttcccataatttcctttcaaggtggggagggaggtagaggggtgatgtggggagtacgctgcagggcctcactccttttgcagaccacagtccatgccatcactgccacccagaagactgtggatggcccctccgggaaactgtggcgtgatggccgcggggctctccagaacatcatccctgcctctactggcgctgccaaggctgtgggcaaggtcatccctgagctgaacgggaagctcactggcatggccttccgtgtccccactgccaacgtgtcagtggtggacctgacctgccgtctagaaaaacctgccaaatatgatgacatcaagaaggtggtgaagcaggcgtcggagggccccctcaagggcatcctgggctacactgagcaccaggtggtctcctctgacttcaacagcgacacccactcctccacctttgacgctggggctggcattgccctcaacgaccactttgtcaagctcatctcttggtacgacaatgagttcggatatagcaatagagtggtcgatctgatggctcatatggctagcaaagagggaagcggagctactaacttcagcctgctgaagcaggctggagacgtggaggagaaccctggacctatggtgagcaagggcgaggagctgttcaccggggtggtgcccatcctggtcgagctggacggcgacgtaaacggccacaagttcagcgtgtccggcgagggcgagggcgatgccacctacggcaagctgaccctgaagttcatctgcaccaccggcaagctgcccgtgccctggcccaccctcgtgaccaccctgacctacggcgtgcagtgcttcagccgctaccccgaccacatgaagcagcacgacttcttcaagtccgccatgcccgaaggctacgtccaggagcgcaccatcttcttcaaggacgacggcaactacaagacccgcgccgaggtgaagttcgagggcgacaccctggtgaaccgcatcgagctgaagggcatcgacttcaaggaggacggcaacatcctggggcacaagctggagtacaactacaacagccacaacgtctatatcatggccgacaagcagaagaacggcatcaaggtgaacttcaagatccgccacaacatcgaggacggcagcgtgcagctcgccgaccactaccagcagaacacccccatcggcgacggccccgtgctgctgcccgacaaccactacctgagcacccagtccgccctgagcaaagaccccaacgagaagcgcgatcacatggtcctgctggagttcgtgaccgccgccgggatcactctcggcatggacgagctgtacaagtgagcggccgcgtcgagtctagagggcccgtttaaacccgctgatcagcctcgactgtgccttctagttgccagccatctgttgtttgcccctcccccgtgccttccttgaccctggaaggtgccactcccactgtcctttcctaataaaatgaggaaattgcatcgcattgtctgagtaggtgtcattctattctggggggtggggtggggcaggacagcaagggggaggattgggaagacaatagcaggcatgctggggatgcggtgggctctatggagactggctcttaaaaagtgcagggtctggcgccctctggtggctggctcagaaaaagggccctgacaactcttttcatcttctaggtatgacaacgaatttggctacagcaacagggtggtggacctcatggcccacatggcctccaaggagtaagacccctggaccaccagccccagcaagagcacaagaggaagagagagaccctcactgctggggagtccctgccacactcagtcccccaccacactgaatctcccctcctcacagttgccatgtagaccccttgaagaggggaggggcctagggagccgcaccttgtcatgtaccatcaataaagtaccctgtgctcaaccagttacttgtcctgtcttattctagggtctggggcagaggggagggaagctgggcttgtgtcaaggtgagacattcttgctggggagggacctggtatgttctcctcagactgagggtagggcctccaaacagccttgcttgct

SEQ ID NO: 47 - DNA, 2124 bp, Artificial Sequence
  Description of Artificial Sequence: Synthetic polynucleotide
gcagacttccatttacagtgaggaggtgagcattgcattgaacaaaagatggcgttttcacttggaattagttatctgaagctttaggattcctcagcaatatgattatgagacaagaaaggaagattcagaaatgagtctagttgaaggcagcaattcagagaagaagattcagttgttatcattgccgtcctgcttggtttatggcctggttcaggaccaaggagagaagtgtgaatacatgcctcttgagctatagaatgagacgctggagtcactaagatgattttttaaaagtattgttttataaacaaaaataagattgtgacaagggattccactattaatgttttcatgcctgtgccttaatctgactgggtatggtgagaattgtgcttgcagctttaaggtaagaattttaccatcttaatatgttaagaagtgccatttcagtctctcatctctactccaacttgtcttcttaggtgctaaagtcagagccgaaatctacgaggccttcgagaacatctaccccatcctgaagggcttcagaaagaccaccggaagcggagctactaacttcagcctgctgaagcaggctggagacgtggaggagaaccctggacctatggtgagcaagggcgaggagctgttcaccggggtggtgcccatcctggtcgagctggacggcgacgtaaacggccacaagttcagcgtgtccggcgagggcgagggcgatgccacctacggcaagctgaccctgaagttcatctgcaccaccggcaagctgcccgtgccctggcccaccctcgtgaccaccctgacctacggcgtgcagtgcttcagccgctaccccgaccacatgaagcagcacgacttcttcaagtccgccatgcccgaaggctacgtccaggagcgcaccatcttcttcaaggacgacggcaactacaagacccgcgccgaggtgaagttcgagggcgacaccctggtgaaccgcatcgagctgaagggcatcgacttcaaggaggacggcaacatcctggggcacaagctggagtacaactacaacagccacaacgtctatatcatggccgacaagcagaagaacggcatcaaggtgaacttcaagatccgccacaacatcgaggacggcagcgtgcagctcgccgaccactaccagcagaacacccccatcggcgacggccccgtgctgctgcccgacaaccactacctgagcacccagtccgccctgagcaaagaccccaacgagaagcgcgatcacatggtcctgctggagttcgtgaccgccgccgggatcactctcggcatggacgagctgtacaagtgagcggccgcgtcgagtctagagggcccgtttaaacccgctgatcagcctcgactgtgccttctagttgccagccatctgttgtttgcccctcccccgtgccttccttgaccctggaaggtgccactcccactgtcctttcctaataaaatgaggaaattgcatcgcattgtctgagtaggtgtcattctattctggggggtggggtggggcaggacagcaagggggaggattgggaagacaatagcaggcatgctggggatgcggtgggctctatggcagaaatttatgaagcatttgaaaacatctaccctattctaaagggattcaggaagacgacgtaatggctctcatgtacccttgcctcccccacccccttctttttttttttttaaacaaatcagtttgttttggtacctttaaatggtggtgttgtgagaagatggatgttgagttgcagggtgtggcaccaggtgatgcccttctgtaagtgcccaccgcgggatgccgggaaggggcattatttgtgcactgagaacaccgcgcagcgtgactgtgagttgctcataccgtgctgctatctgggcagcgctgcccatttatttatatgtagattttaaacactgctgttgacaagttggtttgagggagaaaactttaagtgttaaagccacctctataattgattggactttttaattttaatgtttttccccatgaaccacagtttttatatttctaccagaaaagtaaaaatcttttttaaaagtgttgttttt

SEQ ID NO: 48 - DNA, 2369 bp, Artificial Sequence
  Description of Artificial Sequence: Synthetic polynucleotide
gaagactgtggatggcccctccgggaaactgtggcgtgatggccgcggggctctccagaacatcatccctgcctctactggcgctgccaaggctgtgggcaaggtcatccctgagctgaacgggaagctcactggcatggccttccgtgtccccactgccaacgtgtcagtggtggacctgacctgccgtctagaaaaacctgccaaatatgatgacatcaagaaggtggtgaagcaggcgtcggagggccccctcaagggcatcctgggctacactgagcaccaggtggtctcctctgacttcaacagcgacacccactcctccacctttgacgctggggctggcattgccctcaacgaccactttgtcaagctcatttcctggtatgtggctggggccagagactggctcttaaaaagtgcagggtctggcgccctctggtggctggctcagaaaaagggccctgacaactctttacatcttctaggtatgacaacgagttcggatatagcaatagagtggtcgatctgatggctcatatggctagcaaagagggaagcggagctactaacttcagcctgctgaagcaggctggagacgtggaggagaaccctggacctatgtggcccctggtagcggcgctgttgctgggctcggcgtgctgcggatcagctcagctactatttaataaaacaaaatctgtagaattcacgttttgtaatgacactgtcgtcattccatgctttgttactaatatggaggcacaaaacactactgaagtatacgtaaagtggaaatttaaaggaagagatatttacacctttgatggagctctaaacaagtccactgtccccactgactttagtagtgcaaaaattgaagtctcacaattactaaaaggagatgcctctttgaagatggataagagtgatgctgtctcacacacaggaaactacacttgtgaagtaacagaattaaccagagaaggtgaaacgatcatcgagctaaaatatcgtgttgtttcatggttttctccaaatgaaaatattcttattgttattttcccaatttttgctatactcctgttctggggacagtttggtattaaaacacttaaatatagatccggtggtatggatgagaaaacaattgctttacttgttgctggactagtgatcactgtcattgtcattgttggagccattcttttcgtcccaggtgaatattcattaaagaatgctactggccttggtttaattgtgacttctacagggatattaatattacttcactactatgtgtttagtacagcgattggattaacctccttcgtcattgccatattggttattcaggtgatagcctatatcctcgctgtggttggactgagtctctgtattgcggcgtgtataccaatgcatggccctcttctgatttcaggtttgagtatcttagctctagcacaattacttggactagtttatatgaaatttgtggcttccaatcagaagactatacaacctcctaggaaagctgtagaggaaccccttaatgcattcaaagaatcaaaaggaatgatgaatgatgaatgagcggccgcgtcgagtctagagggcccgtttaaacccgctgatcagcctcgactgtgccttctagttgccagccatctgttgtttgcccctcccccgtgccttccttgaccctggaaggtgccactcccactgtcctttcctaataaaatgaggaaattgcatcgcattgtctgagtaggtgtcattctattctggggggtggggtggggcaggacagcaagggggaggattgggaagacaatagcaggcatgctggggatgcggtgggctctatggatttggctacagcaacagggtggtggacctcatggcccacatggcctccaaggagtaagacccctggaccaccagccccagcaagagcacaagaggaagagagagaccctcactgctggggagtccctgccacactcagtcccccaccacactgaatctcccctcctcacagttgccatgtagaccccttgaagaggggaggggcctagggagccgcaccttgtcatgtaccatcaataaagtaccctgtgctcaaccagttacttgtcctgtcttattctagggtctggggcagaggggagggaagctgggcttgtgtcaaggtgagacattcttgctggggagggacctggtatgttctcctcagactgagggtagggcctccaaacagccttgcttgcttcgagaaccatttgcttcccgctcagacgtcttgagtgctacaggaagctggcaccactacttcagagaacaaggccttttcctctcctcgctccagt

SEQ ID NO: 49 - DNA, 2142 bp, Artificial Sequence
  Description of Artificial Sequence: Synthetic polynucleotide
ctgaccacagctctgcaagcagacttccatttacagtgaggaggtgagcattgcattgaacaaaagatggcgttttcacttggaattagttatctgaagctttaggattcctcagcaatatgattatgagacaagaaaggaagattcagaaatgagtctagttgaaggcagcaattcagagaagaagattcagttgttatcattgccgtcctgcttggtttatggcctggttcaggaccaaggagagaagtgtgaatacatgcctcttgagctatagaatgagacgctggagtcactaagatgattttttaaaagtattgttttataaacaaaaataagattgtgacaagggattccactattaatgttttcatgcctgtgccttaatctgactgggtatggtgagaattgtgcttgcagctttaaggtaagaattttaccatcttaatatgttaagaagtgccatttcagtctctcatctctactccaacttgtcttcttaggggctaaagtgcgggccgagatctacgaggccttcgagaatatctaccccatcctgaagggcttcagaaagaccaccggaagcggagctactaacttcagcctgctgaagcaggctggagacgtggaggagaaccctggacctatggtgagcaagggcgaggagctgttcaccggggtggtgcccatcctggtcgagctggacggcgacgtaaacggccacaagttcagcgtgtccggcgagggcgagggcgatgccacctacggcaagctgaccctgaagttcatctgcaccaccggcaagctgcccgtgccctggcccaccctcgtgaccaccctgacctacggcgtgcagtgcttcagccgctaccccgaccacatgaagcagcacgacttcttcaagtccgccatgcccgaaggctacgtccaggagcgcaccatcttcttcaaggacgacggcaactacaagacccgcgccgaggtgaagttcgagggcgacaccctggtgaaccgcatcgagctgaagggcatcgacttcaaggaggacggcaacatcctggggcacaagctggagtacaactacaacagccacaacgtctatatcatggccgacaagcagaagaacggcatcaaggtgaacttcaagatccgccacaacatcgaggacggcagcgtgcagctcgccgaccactaccagcagaacacccccatcggcgacggccccgtgctgctgcccgacaaccactacctgagcacccagtccgccctgagcaaagaccccaacgagaagcgcgatcacatggtcctgctggagttcgtgaccgccgccgggatcactctcggcatggacgagctgtacaagtgagcggccgcgtcgagtctagagggcccgtttaaacccgctgatcagcctcgactgtgccttctagttgccagccatctgttgtttgcccctcccccgtgccttccttgaccctggaaggtgccactcccactgtcctttcctaataaaatgaggaaattgcatcgcattgtctgagtaggtgtcattctattctggggggtggggtggggcaggacagcaagggggaggattgggaagacaatagcaggcatgctggggatgcggtgggctctatggtaggtgctaaagtcagagcagaaatttatgaagcatttgaaaacatctaccctattctaaagggattcaggaagacgacgtaatggctctcatgtacccttgcctcccccacccccttctttttttttttttaaacaaatcagtttgttttggtacctttaaatggtggtgttgtgagaagatggatgttgagttgcagggtgtggcaccaggtgatgcccttctgtaagtgcccaccgcgggatgccgggaaggggcattatttgtgcactgagaacaccgcgcagcgtgactgtgagttgctcataccgtgctgctatctgggcagcgctgcccatttatttatatgtagattttaaacactgctgttgacaagttggtttgagggagaaaactttaagtgttaaagccacctctataattgattggactttttaattttaatgtttttccccatgaaccacagtttttatatttctaccagaaaagtaaaaatcttt

SEQ ID NO: 50 - DNA, 2083 bp, Artificial Sequence
  Description of Artificial Sequence: Synthetic polynucleotide
acaaaagatggcgttttcacttggaattagttatctgaagctttaggattcctcagcaatatgattatgagacaagaaaggaagattcagaaatgagtctagttgaaggcagcaattcagagaagaagattcagttgttatcattgccgtcctgcttggtttatggcctggttcaggaccaaggagagaagtgtgaatacatgcctcttgagctatagaatgagacgctggagtcactaagatgattttttaaaagtattgttttataaacaaaaataagattgtgacaagggattccactattaatgttttcatgcctgtgccttaatctgactgggtatggtgagaattgtgcttgcagctttaaggtaagaattttaccatcttaatatgttaagaagtgccatttcagtctctcatctctactccaacttgtcttcttaggtgctaaagtcagagcagaaatttatgaagcattcgagaacatctaccctattctaaagggattcaggaagacgacgggaagcggagctactaacttcagcctgctgaagcaggctggagacgtggaggagaaccctggacctatggtgagcaagggcgaggagctgttcaccggggtggtgcccatcctggtcgagctggacggcgacgtaaacggccacaagttcagcgtgtccggcgagggcgagggcgatgccacctacggcaagctgaccctgaagttcatctgcaccaccggcaagctgcccgtgccctggcccaccctcgtgaccaccctgacctacggcgtgcagtgcttcagccgctaccccgaccacatgaagcagcacgacttcttcaagtccgccatgcccgaaggctacgtccaggagcgcaccatcttcttcaaggacgacggcaactacaagacccgcgccgaggtgaagttcgagggcgacaccctggtgaaccgcatcgagctgaagggcatcgacttcaaggaggacggcaacatcctggggcacaagctggagtacaactacaacagccacaacgtctatatcatggccgacaagcagaagaacggcatcaaggtgaacttcaagatccgccacaacatcgaggacggcagcgtgcagctcgccgaccactaccagcagaacacccccatcggcgacggccccgtgctgctgcccgacaaccactacctgagcacccagtccgccctgagcaaagaccccaacgagaagcgcgatcacatggtcctgctggagttcgtgaccgccgccgggatcactctcggcatggacgagctgtacaagtgagcggccgcgtcgagtctagagggcccgtttaaacccgctgatcagcctcgactgtgccttctagttgccagccatctgttgtttgcccctcccccgtgccttccttgaccctggaaggtgccactcccactgtcctttcctaataaaatgaggaaattgcatcgcattgtctgagtaggtgtcattctattctggggggtggggtggggcaggacagcaagggggaggattgggaagacaatagcaggcatgctggggatgcggtgggctctatggaagggattcaggaagacgacgtaatggctctcatgtacccttgcctcccccacccccttctttttttttttttaaacaaatcagtttgttttggtacctttaaatggtggtgttgtgagaagatggatgttgagttgcagggtgtggcaccaggtgatgcccttctgtaagtgcccaccgcgggatgccgggaaggggcattatttgtgcactgagaacaccgcgcagcgtgactgtgagttgctcataccgtgctgctatctgggcagcgctgcccatttatttatatgtagattttaaacactgctgttgacaagttggtttgagggagaaaactttaagtgttaaagccacctctataattgattggactttttaattttaatgtttttccccatgaaccacagtttttatatttctaccagaaaagtaaaaatcttttttaaaagtgttgtttttctaatttataactcctaggggttatttctgtgccagacaca

SEQ ID NO: 51 - DNA, 2084 bp, Artificial Sequence
  Description of Artificial Sequence: Synthetic polynucleotide
ggcccgggggactccacatggtggcaggcagtggcatcagcaagacactctctccctcacagaacgtgaagctccctgacgcctatgagcgcctcatcctggacgtcttctgcgggagccagatgcacttcgtgcgcaggtgaggcccagctgccggcccctgcatacctgtgggctatggggtggcctttgccctccctccctgtgtgccaccggcctcccaagccataccatgtcccctcagcgacgagctccgtgaggcctggcgtattttcaccccactgctgcaccagattgagctggagaagcccaagcccatcccctatatttatggcaggtgaggaaagggtgggggctggggacagagcccagcgggcaggggcggggtgagggtggagctacctcatgcctctcctccacccgtcactctccagccgaggccccacggaggcagacgagctgatgaagagagtgggcttccagtacgagggaacctacaaatgggtcaaccctcacaagctgggaagcggagctactaacttcagcctgctgaagcaggctggagacgtggaggagaaccctggacctatggtgagcaagggcgaggagctgttcaccggggtggtgcccatcctggtcgagctggacggcgacgtaaacggccacaagttcagcgtgtccggcgagggcgagggcgatgccacctacggcaagctgaccctgaagttcatctgcaccaccggcaagctgcccgtgccctggcccaccctcgtgaccaccctgacctacggcgtgcagtgcttcagccgctaccccgaccacatgaagcagcacgacttcttcaagtccgccatgcccgaaggctacgtccaggagcgcaccatcttcttcaaggacgacggcaactacaagacccgcgccgaggtgaagttcgagggcgacaccctggtgaaccgcatcgagctgaagggcatcgacttcaaggaggacggcaacatcctggggcacaagctggagtacaactacaacagccacaacgtctatatcatggccgacaagcagaagaacggcatcaaggtgaacttcaagatccgccacaacatcgaggacggcagcgtgcagctcgccgaccactaccagcagaacacccccatcggcgacggccccgtgctgctgcccgacaaccactacctgagcacccagtccgccctgagcaaagaccccaacgagaagcgcgatcacatggtcctgctggagttcgtgaccgccgccgggatcactctcggcatggacgagctgtacaagtgagcggccgcgtcgagtctagagggcccgtttaaacccgctgatcagcctcgactgtgccttctagttgccagccatctgttgtttgcccctcccccgtgccttccttgaccctggaaggtgccactcccactgtcctttcctaataaaatgaggaaattgcatcgcattgtctgagtaggtgtcattctattctggggggtggggtggggcaggacagcaagggggaggattgggaagacaatagcaggcatgctggggatgcggtgggctctatgggtgggtgaacccccacaagctctgagccctgggcacccacctccacccccgccacggccaccctccttcccgccgcccgaccccgagtcgggaggactccgggaccattgacctcagctgcacattcctggccccgggctctggccaccctggcccgcccctcgctgctgctactacccgagcccagctacattcctcagctgccaagcactcgagaccatcctggcccctccagaccctgcctgagcccaggagctgagtcacctcctccactcactccagcccaacagaaggaaggaggagggcgcccattcgtctgtcccagagcttattggccactgggtctcactcctgagtggggccagggtgggagggagggacgagggggaggaaaggggcgagcacccacgtgagagaatctgcctgtggccttgcccgccagcctcagtgccacttgacattccttgtcaccagcaacatctcgagccccctggatgtcc

SEQ ID NO: 52 - DNA, 2149 bp, Artificial Sequence
  Description of Artificial Sequence: Synthetic polynucleotide
ccagggggctgtagtggggccaggctggacctctgtgccctgagcatggctttcttgtttttcagttttggaactccccaaagagctgtcagaaatctttgatcccacacgaggtaggctgctgcattcctccctgaggctaggggtaagggacacagctcattgggtcctatggctgttttcttgcccttttgaggaccttgttgtggcgcttatggtaactggggcaaagggtgaagttcctgatgggcaggtggggttccctttcctgggctttggtgggtggagaggtgggagctggaatgttagtaactgagctccctccattcccagagtgcatgagctcggagctgctggaggagttgatgtcctcagaaggtgggtggccctggaaggtgggagtgggtgtgggcaggggttgggctgctgctaggggagccctggcccagggcctgagactagtgctctctgcagtgttcgcccctctgctgagactttctcctcctcctggcgaccacgactacatctacaacctggacgagagcgagggcgtgtgcgacctgtttgatgtgcccgtgctgaacctgggaagcggagctactaacttcagcctgctgaagcaggctggagacgtggaggagaaccctggacctatggtgagcaagggcgaggagctgttcaccggggtggtgcccatcctggtcgagctggacggcgacgtaaacggccacaagttcagcgtgtccggcgagggcgagggcgatgccacctacggcaagctgaccctgaagttcatctgcaccaccggcaagctgcccgtgccctggcccaccctcgtgaccaccctgacctacggcgtgcagtgcttcagccgctaccccgaccacatgaagcagcacgacttcttcaagtccgccatgcccgaaggctacgtccaggagcgcaccatcttcttcaaggacgacggcaactacaagacccgcgccgaggtgaagttcgagggcgacaccctggtgaaccgcatcgagctgaagggcatcgacttcaaggaggacggcaacatcctggggcacaagctggagtacaactacaacagccacaacgtctatatcatggccgacaagcagaagaacggcatcaaggtgaacttcaagatccgccacaacatcgaggacggcagcgtgcagctcgccgaccactaccagcagaacacccccatcggcgacggccccgtgctgctgcccgacaaccactacctgagcacccagtccgccctgagcaaagaccccaacgagaagcgcgatcacatggtcctgctggagttcgtgaccgccgccgggatcactctcggcatggacgagctgtacaagtgagcggccgcgtcgagtctagagggcccgtttaaacccgctgatcagcctcgactgtgccttctagttgccagccatctgttgtttgcccctcccccgtgccttccttgaccctggaaggtgccactcccactgtcctttcctaataaaatgaggaaattgcatcgcattgtctgagtaggtgtcattctattctggggggtggggtggggcaggacagcaagggggaggattgggaagacaatagcaggcatgctggggatgcggtgggctctatggccacccccgggagaccacgattatatctacaacctggacgagagtgaaggtgtctgtgacctctttgatgtgcctgttctcaacctctgactgacagggacatgccctgtgtggctgggacccagactgtctgacctgggggttgcctggggacctctcccacccgacccctacagagcttgagagccacagacgcctggcttctccggcctcccctcaccgcacagttctggccacagctcccgctcctgtgctggcacttctgtgctcgcagagcaggggaacaggactcagcccccatcaccgtggagccaaagtgtttgcttctccctttctgcggccttcgccagcccaggctcggctgccacccagtggcacagaaccgaggagctgccattaccccccatagggggcagtgtcttgttcctgccagcctcagtgtcttgcttctgccagctccttcccctaggagggaagggtggggtggaactgggcacatg

SEQ ID NO: 53 - DNA, 2130 bp, Artificial Sequence
  Description of Artificial Sequence: Synthetic polynucleotide
ccaggctggacctctgtgccctgagcatggctttcttgtttttcagttttggaactccccaaagagctgtcagaaatctttgatcccacacgaggtaggctgctgcattcctccctgaggctaggggtaagggacacagctcattgggtcctatggctgttttcttgcccttttgaggaccttgttgtggcgcttatggtaactggggcaaagggtgaagttcctgatgggcaggtggggttccctttcctgggctttggtgggtggagaggtgggagctggaatgttagtaactgagctccctccattcccagagtgcatgagctcggagctgctggaggagttgatgtcctcagaaggtgggtggccctggaaggtgggagtgggtgtgggcaggggttgggctgctgctaggggagccctggcccagggcctgagactagtgctctctgcagtgtttgcccctctgcttcgtcttagtcctcctccgggcgaccacgactacatctacaacctggacgagagcgagggcgtgtgcgacctgtttgatgtgcccgtgctgaacctgggaagcggagctactaacttcagcctgctgaagcaggctggagacgtggaggagaaccctggacctatggtgagcaagggcgaggagctgttcaccggggtggtgcccatcctggtcgagctggacggcgacgtaaacggccacaagttcagcgtgtccggcgagggcgagggcgatgccacctacggcaagctgaccctgaagttcatctgcaccaccggcaagctgcccgtgccctggcccaccctcgtgaccaccctgacctacggcgtgcagtgcttcagccgctaccccgaccacatgaagcagcacgacttcttcaagtccgccatgcccgaaggctacgtccaggagcgcaccatcttcttcaaggacgacggcaactacaagacccgcgccgaggtgaagttcgagggcgacaccctggtgaaccgcatcgagctgaagggcatcgacttcaaggaggacggcaacatcctggggcacaagctggagtacaactacaacagccacaacgtctatatcatggccgacaagcagaagaacggcatcaaggtgaacttcaagatccgccacaacatcgaggacggcagcgtgcagctcgccgaccactaccagcagaacacccccatcggcgacggccccgtgctgctgcccgacaaccactacctgagcacccagtccgccctgagcaaagaccccaacgagaagcgcgatcacatggtcctgctggagttcgtgaccgccgccgggatcactctcggcatggacgagctgtacaagtgagcggccgcgtcgagtctagagggcccgtttaaacccgctgatcagcctcgactgtgccttctagttgccagccatctgttgtttgcccctcccccgtgccttccttgaccctggaaggtgccactcccactgtcctttcctaataaaatgaggaaattgcatcgcattgtctgagtaggtgtcattctattctggggggtggggtggggcaggacagcaagggggaggattgggaagacaatagcaggcatgctggggatgcggtgggctctatggattatatctacaacctggacgagagtgaaggtgtctgtgacctctttgatgtgcctgttctcaacctctgactgacagggacatgccctgtgtggctgggacccagactgtctgacctgggggttgcctggggacctctcccacccgacccctacagagcttgagagccacagacgcctggcttctccggcctcccctcaccgcacagttctggccacagctcccgctcctgtgctggcacttctgtgctcgcagagcaggggaacaggactcagcccccatcaccgtggagccaaagtgtttgcttctccctttctgcggccttcgccagcccaggctcggctgccacccagtggcacagaaccgaggagctgccattaccccccatagggggcagtgtcttgttcctgccagcctcagtgtcttgcttctgccagctccttcccctaggagggaagggtggggtggaactgggcacatgccagcaccacttctagctt

SEQ ID NO: 54 - DNA, 2062 bp, Artificial Sequence
  Description of Artificial Sequence: Synthetic polynucleotide
gtcagaaatctttgatcccacacgaggtaggctgctgcattcctccctgaggctaggggtaagggacacagctcattgggtcctatggctgttttcttgcccttttgaggaccttgttgtggcgcttatggtaactggggcaaagggtgaagttcctgatgggcaggtggggttccctttcctgggctttggtgggtggagaggtgggagctggaatgttagtaactgagctccctccattcccagagtgcatgagctcggagctgctggaggagttgatgtcctcagaaggtgggtggccctggaaggtgggagtgggtgtgggcaggggttgggctgctgctaggggagccctggcccagggcctgagactagtgctctctgcagtgtttgcccctctgcttcgtctttctccacccccgggagaccacgattatatctacaacctggacgagagtgaaggtgtctgtgacctcttcgacgtgcccgtgctcaacctcggaagcggagctactaacttcagcctgctgaagcaggctggagacgtggaggagaaccctggacctatggtgagcaagggcgaggagctgttcaccggggtggtgcccatcctggtcgagctggacggcgacgtaaacggccacaagttcagcgtgtccggcgagggcgagggcgatgccacctacggcaagctgaccctgaagttcatctgcaccaccggcaagctgcccgtgccctggcccaccctcgtgaccaccctgacctacggcgtgcagtgcttcagccgctaccccgaccacatgaagcagcacgacttcttcaagtccgccatgcccgaaggctacgtccaggagcgcaccatcttcttcaaggacgacggcaactacaagacccgcgccgaggtgaagttcgagggcgacaccctggtgaaccgcatcgagctgaagggcatcgacttcaaggaggacggcaacatcctggggcacaagctggagtacaactacaacagccacaacgtctatatcatggccgacaagcagaagaacggcatcaaggtgaacttcaagatccgccacaacatcgaggacggcagcgtgcagctcgccgaccactaccagcagaacacccccatcggcgacggccccgtgctgctgcccgacaaccactacctgagcacccagtccgccctgagcaaagaccccaacgagaagcgcgatcacatggtcctgctggagttcgtgaccgccgccgggatcactctcggcatggacgagctgtacaagtgagcggccgcgtcgagtctagagggcccgtttaaacccgctgatcagcctcgactgtgccttctagttgccagccatctgttgtttgcccctcccccgtgccttccttgaccctggaaggtgccactcccactgtcctttcctaataaaatgaggaaattgcatcgcattgtctgagtaggtgtcattctattctggggggtggggtggggcaggacagcaagggggaggattgggaagacaatagcaggcatgctggggatgcggtgggctctatggtgactgacagggacatgccctgtgtggctgggacccagactgtctgacctgggggttgcctggggacctctcccacccgacccctacagagcttgagagccacagacgcctggcttctccggcctcccctcaccgcacagttctggccacagctcccgctcctgtgctggcacttctgtgctcgcagagcaggggaacaggactcagcccccatcaccgtggagccaaagtgtttgcttctccctttctgcggccttcgccagcccaggctcggctgccacccagtggcacagaaccgaggagctgccattaccccccatagggggcagtgtcttgttcctgccagcctcagtgtcttgcttctgccagctccttcccctaggagggaagggtggggtggaactgggcacatgccagcaccacttctagcttccttcgctatcccccaccccctgaccctccagctcctcctggccctctcacgtgcccacttctgctgg

SEQ ID NO: 55 - DNA, 2188 bp, Artificial Sequence
  Description of Artificial Sequence: Synthetic polynucleotide
agagcagggtttcttgacagcagtgctattggcattttaaactggataattctttgttgtgatgggctttcctgtggactgtactatgttggtacacaagaaaaacagtgtactatgtgaatactcactcaaagccagtagcactccctgattgtaacaccaaaaaagtctctcagcattgccaaatgtcccctgtggcagcagaatcactccctgatgagaaccactaccctggagtaaaatctataactatgtcttagaaaataacacagaaaattaatatttctttcactctactccttccattagtgatcaaataaagaaggcatttggcgctacttgccaaattgttggctcaaacttgtgctgaaccttttttggttttctacacttaagtttttttgcctataacccagagaactttgaaaatagagtgtagttaatgtgtatctaatgttactttgtattgacttaatttaccggcctttaatccacagcataagaagtcccacggcaaggacaaagagaaccggggcatcaacacactggaacggtccaaggtcgaggaaacaaccgagcacctggtcaccaagagcagactgcctctgagagcccagatcaacctgggaagcggagctactaacttcagcctgctgaagcaggctggagacgtggaggagaaccctggacctatggtgagcaagggcgaggagctgttcaccggggtggtgcccatcctggtcgagctggacggcgacgtaaacggccacaagttcagcgtgtccggcgagggcgagggcgatgccacctacggcaagctgaccctgaagttcatctgcaccaccggcaagctgcccgtgccctggcccaccctcgtgaccaccctgacctacggcgtgcagtgcttcagccgctaccccgaccacatgaagcagcacgacttcttcaagtccgccatgcccgaaggctacgtccaggagcgcaccatcttcttcaaggacgacggcaactacaagacccgcgccgaggtgaagttcgagggcgacaccctggtgaaccgcatcgagctgaagggcatcgacttcaaggaggacggcaacatcctggggcacaagctggagtacaactacaacagccacaacgtctatatcatggccgacaagcagaagaacggcatcaaggtgaacttcaagatccgccacaacatcgaggacggcagcgtgcagctcgccgaccactaccagcagaacacccccatcggcgacggccccgtgctgctgcccgacaaccactacctgagcacccagtccgccctgagcaaagaccccaacgagaagcgcgatcacatggtcctgctggagttcgtgaccgccgccgggatcactctcggcatggacgagctgtacaagtgagcggccgcgtcgagtctagagggcccgtttaaacccgctgatcagcctcgactgtgccttctagttgccagccatctgttgtttgcccctcccccgtgccttccttgaccctggaaggtgccactcccactgtcctttcctaataaaatgaggaaattgcatcgcattgtctgagtaggtgtcattctattctggggggtggggtggggcaggacagcaagggggaggattgggaagacaatagcaggcatgctggggatgcggtgggctctatggaaaaaatcacatggaaaagacaaagaaaacagaggcattaacacactggagaggtctaaagtggaagaaactacagagcacttggttacaaagagcagattacctctgcgagcccagatcaacctttaattcacttgggggttggcaattttatttttaaagaaaacttaaaaataaaacctgaaaccccagaacttgagccttgtgtatagattttaaaagaatatatatatcagccgggcgcggtggctcatgcctgtaatcccagcactttgggaggctgaggcgggtggattgcttgagcccaggagtttgagaccagcctggccaacgtggcaaaacctcgtctctgttaaaaattagccgggcgtggtggcacactcctgtaatcccagctactggggaggctgaggcacgagaatcacttgaacccaggaagcggggttgcagtgagccaaaggtacaccactacactccagcctgggcaacagagcaagact

SEQ ID NO: 56 - DNA, 2120 bp, Artificial Sequence
  Description of Artificial Sequence: Synthetic polynucleotide
ttcctgtggactgtactatgttggtacacaagaaaaacagtgtactatgtgaatactcactcaaagccagtagcactccctgattgtaacaccaaaaaagtctctcagcattgccaaatgtcccctgtggcagcagaatcactccctgatgagaaccactaccctggagtaaaatctataactatgtcttagaaaataacacagaaaattaatatttctttcactctactccttccattagtgatcaaataaagaaggcatttggcgctacttgccaaattgttggctcaaacttgtgctgaaccttttttggttttctacacttaagtttttttgcctataacccagagaactttgaaaatagagtgtagttaatgtgtatctaatgttactttgtattgacttaattttcccgccttaaatccacagcataaaaaatcacatggaaaagacaaagaaaacagaggcattaacacactggagaggtctaaagtggaagaaacaaccgagcacctggtcaccaagagcagactgcctctgagagcccagatcaacctgggaagcggagctactaacttcagcctgctgaagcaggctggagacgtggaggagaaccctggacctatggtgagcaagggcgaggagctgttcaccggggtggtgcccatcctggtcgagctggacggcgacgtaaacggccacaagttcagcgtgtccggcgagggcgagggcgatgccacctacggcaagctgaccctgaagttcatctgcaccaccggcaagctgcccgtgccctggcccaccctcgtgaccaccctgacctacggcgtgcagtgcttcagccgctaccccgaccacatgaagcagcacgacttcttcaagtccgccatgcccgaaggctacgtccaggagcgcaccatcttcttcaaggacgacggcaactacaagacccgcgccgaggtgaagttcgagggcgacaccctggtgaaccgcatcgagctgaagggcatcgacttcaaggaggacggcaacatcctggggcacaagctggagtacaactacaacagccacaacgtctatatcatggccgacaagcagaagaacggcatcaaggtgaacttcaagatccgccacaacatcgaggacggcagcgtgcagctcgccgaccactaccagcagaacacccccatcggcgacggccccgtgctgctgcccgacaaccactacctgagcacccagtccgccctgagcaaagaccccaacgagaagcgcgatcacatggtcctgctggagttcgtgaccgccgccgggatcactctcggcatggacgagctgtacaagtgagcggccgcgtcgagtctagagggcccgtttaaacccgctgatcagcctcgactgtgccttctagttgccagccatctgttgtttgcccctcccccgtgccttccttgaccctggaaggtgccactcccactgtcctttcctaataaaatgaggaaattgcatcgcattgtctgagtaggtgtcattctattctggggggtggggtggggcaggacagcaagggggaggattgggaagacaatagcaggcatgctggggatgcggtgggctctatggaactacagagcacttggctacatagagcagattacctctgcgagcccagatcaacctttaattcacttgggggttggcaattttatttttaaagaaaacttaaaaataaaacctgaaaccccagaacttgagccttgtgtatagattttaaaagaatatatatatcagccgggcgcggtggctcatgcctgtaatcccagcactttgggaggctgaggcgggtggattgcttgagcccaggagtttgagaccagcctggccaacgtggcaaaacctcgtctctgttaaaaattagccgggcgtggtggcacactcctgtaatcccagctactggggaggctgaggcacgagaatcacttgaacccaggaagcggggttgcagtgagccaaaggtacaccactacactccagcctgggcaacagagcaagactcggtctcaaaaacaaaatttaaaaaagatataaggcagtactgtaaattcagttgaattttgatatct

SEQ ID NO: 57 - DNA, 2152 bp, Artificial Sequence
  Description of Artificial Sequence: Synthetic polynucleotide
ttaaactggataattctttgttgtgatgggctttcctgtggactgtactatgttggtacacaagaaaaacagtgtactatgtgaatactcactcaaagccagtagcactccctgattgtaacaccaaaaaagtctctcagcattgccaaatgtcccctgtggcagcagaatcactccctgatgagaaccactaccctggagtaaaatctataactatgtcttagaaaataacacagaaaattaatatttctttcactctactccttccattagtgatcaaataaagaaggcatttggcgctacttgccaaattgttggctcaaacttgtgctgaaccttttttggttttctacacttaagtttttttgcctataacccagagaactttgaaaatagagtgtagttaatgtgtatctaatgttactttgtattgacttaattttcccgccttaaatccacagcataaaaaatcacatggaaaagacaaagaaaacagaggcatcaacacactggaacggtccaaggtcgaggaaacaaccgagcacctggtcaccaagagcagactgcctctgagagcccagatcaacctgggaagcggagctactaacttcagcctgctgaagcaggctggagacgtggaggagaaccctggacctatggtgagcaagggcgaggagctgttcaccggggtggtgcccatcctggtcgagctggacggcgacgtaaacggccacaagttcagcgtgtccggcgagggcgagggcgatgccacctacggcaagctgaccctgaagttcatctgcaccaccggcaagctgcccgtgccctggcccaccctcgtgaccaccctgacctacggcgtgcagtgcttcagccgctaccccgaccacatgaagcagcacgacttcttcaagtccgccatgcccgaaggctacgtccaggagcgcaccatcttcttcaaggacgacggcaactacaagacccgcgccgaggtgaagttcgagggcgacaccctggtgaaccgcatcgagctgaagggcatcgacttcaaggaggacggcaacatcctggggcacaagctggagtacaactacaacagccacaacgtctatatcatggccgacaagcagaagaacggcatcaaggtgaacttcaagatccgccacaacatcgaggacggcagcgtgcagctcgccgaccactaccagcagaacacccccatcggcgacggccccgtgctgctgcccgacaaccactacctgagcacccagtccgccctgagcaaagaccccaacgagaagcgcgatcacatggtcctgctggagttcgtgaccgccgccgggatcactctcggcatggacgagctgtacaagtgagcggccgcgtcgagtctagagggcccgtttaaacccgctgatcagcctcgactgtgccttctagttgccagccatctgttgtttgcccctcccccgtgccttccttgaccctggaaggtgccactcccactgtcctttcctaataaaatgaggaaattgcatcgcattgtctgagtaggtgtcattctattctggggggtggggtggggcaggacagcaagggggaggattgggaagacaatagcaggcatgctggggatgcggtgggctctatggattaacacactggagagttctgaagtggaagaaactacagagcacttggttacaaagagcagattacctctgcgagcccagatcaacctttaattcacttgggggttggcaattttatttttaaagaaaacttaaaaataaaacctgaaaccccagaacttgagccttgtgtatagattttaaaagaatatatatatcagccgggcgcggtggctcatgcctgtaatcccagcactttgggaggctgaggcgggtggattgcttgagcccaggagtttgagaccagcctggccaacgtggcaaaacctcgtctctgttaaaaattagccgggcgtggtggcacactcctgtaatcccagctactggggaggctgaggcacgagaatcacttgaacccaggaagcggggttgcagtgagccaaaggtacaccactacactccagcctgggcaacagagcaagactcggtctcaaaaacaaaatttaaaaaagatataaggc

SEQ ID NO: 58 - protein, 1334 aa, Artificial Sequence
  Description of Artificial Sequence: Synthetic polypeptide
MGHHHHHHGSTQFEGFTNLYQVSKTLRFELIPQGKTLKHIQEQGFIEEDKARNDHYKELKPIIDRIYKTYADQCLQLVQLDWENLSAAIDSYRKEKTEETRNALIEEQATYRNAIHDYFIGRTDNLTDAINKRHAEIYKGLFKAELFNGKVLKQLGTVTTTEHENALLRSFDKFTTYFSGFYENRKNVFSAEDISTAIPHRIVQDNFPKFKENCHIFTRLITAVPSLREHFENVKKAIGIFVSTSIEEVFSFPFYNQLLTQTQIDLYNQLLGGISREAGTEKIKGLNEVLNLAIQKNDETAHIIASLPHRFIPLFKQILSDRNTLSFILEEFKSDEEVIQSFCKYKTLLRNENVLETAEALFNELNSIDLTHIFISHKKLETISSALCDHWDTLRNALYERRISELTGKITKSAKEKVQRSLKHEDINLQEIISAAGKELSEAFKQKTSEILSHAHAALDQPLPTTLKKQEEKEILKSQLDSLLGLYHLLDWFAVDESNEVDPEFSARLTGIKLEMEPSLSFYNKARNYATKKPYSVEKFKLNFQMPTLASGWDVNKEKNNGAILFVKNGLYYLGIMPKQKGRYKALSFEPTEKTSEGFDKMYYDYFPDAAKMIPKCSTQLKAVTAHFQTHTTPILLSNNFIEPLEITKEIYDLNNPEKEPKKFQTAYAKKTGDQKGYREALCKWIDFTRDFLSKYTKTTSIDLSSLRPSSQYKDLGEYYAELNPLLYHISFQRIAEKEIMDAVETGKLYLFQIYNKDFAKGHHGKPNLHTLYWTGLFSPENLAKTSIKLNGQAELFYRPKSRMKRMAARLGEKMLNKKLKDQKTPIPDTLYQELYDYVNHRLSHDLSDEARALLPNVITKEVSHEIIKDRRFTSDKFFFHVPITLNYQAANSPSKFNQRVNAYLKEHPETPIIGIDRGERNLIYITVIDSTGKILEQRSLNTIQQFDYQKKLDNREKERVAARQAWSVVGTIKDLKQGYLSQVIHEIVDLMIHYQAVVVLENLNFGFKSKRTGIAEKAVYQQFEKMLIDKLNCLVLKDYPAEKVGGVLNPYQLTDQFTSFAKMGTQSGFLFYVPAPYTSKIDPLTGFVDPFVWKTIKNHESRKHFLEGFDFLHYDVKTGDFILHFKMNRNLSFQRGLPGFMPAWDIVFEKNETQFDAKGTPFIAGKRIVPVIENHRFTGRYRDLYPANELIALLEEKGIVFRDGSNILPKLLENDDSHAIDTMVALIRSVLQMRNSNAATGEDYINSPVRDLNGVCFDSRFQNPEWPMDADANGAYHIALKGQLLLNHLKESKDLKLQNGISNQDWLAYIQELRNGSPKKKRKVGSPKKKRKV

SEQ ID NO: 59 - protein, 1363 aa, Artificial Sequence
  Description of Artificial Sequence: Synthetic polypeptide
MTQFEGFTNLYQVSKTLRFELIPQGKTLKHIQEQGFIEEDKARNDHYKELKPIIDRIYKTYADQCLQLVQLDWENLSAAIDSYRKEKTEETRNALIEEQATYRNAIHDYFIGRTDNLTDAINKRHAEIYKGLFKAELFNGKVLKQLGTVTTTEHENALLRSFDKFTTYFSGFYENRKNVFSAEDISTAIPHRIVQDNFPKFKENCHIFTRLITAVPSLREHFENVKKAIGIFVSTSIEEVFSFPFYNQLLTQTQIDLYNQLLGGISREAGTEKIKGLNEVLNLAIQKNDETAHIIASLPHRFIPLFKQILSDRNTLSFILEEFKSDEEVIQSFCKYKTLLRNENVLETAEALFNELNSIDLTHIFISHKKLETISSALCDHWDTLRNALYERRISELTGKITKSAKEKVQRSLKHEDINLQEIISAAGKELSEAFKQKTSEILSHAHAALDQPLPTTLKKQEEKEILKSQLDSLLGLYHLLDWFAVDESNEVDPEFSARLTGIKLEMEPSLSFYNKARNYATKKPYSVEKFKLNFQRPTLASGWDVNKEKNNGAILFVKNGLYYLGIMPKQKGRYKALSFEPTEKTSEGFDKMYYDYFPDAAKMIPKCSTQLKAVTAHFQTHTTPILLSNNFIEPLEITKEIYDLNNPEKEPKKFQTAYAKKTGDQKGYREALCKWIDFTRDFLSKYTKTTSIDLSSLRPSSQYKDLGEYYAELNPLLYHISFQRIAEKEIMDAVETGKLYLFQIYNKDFAKGHHGKPNLHTLYWTGLFSPENLAKTSIKLNGQAELFYRPKSRMKRMAHRLGEKMLNKKLKDQKTPIPDTLYQELYDYVNHRLSHDLSDEARALLPNVITKEVSHEIIKDRRFTSDKFLFHVPITLNYQAANSPSKFNQRVNAYLKEHPETPIIGIDRGERNLIYITVIDSTGKILEQRSLNTIQQFDYQKKLDNREKERVAARQAWSVVGTIKDLKQGYLSQVIHEIVDLMIHYQAVVVLENLNFGFKSKRTGIAEKAVYQQFEKMLIDKLNCLVLKDYPAEKVGGVLNPYQLTDQFTSFAKMGTQSGFLFYVPAPYTSKIDPLTGFVDPFVWKTIKNHESRKHFLEGFDFLHYDVKTGDFILHFKMNRNLSFQRGLPGFMPAWDIVFEKNETQFDAKGTPFIAGKRIVPVIENHRFTGRYRDLYPANELIALLEEKGIVFRDGSNILPKLLENDDSHAIDTMVALIRSVLQMRNSNAATGEDYINSPVRDLNGVCFDSRFQNPEWPMDADANGAYHIALKGQLLLNHLKESKDLKLQNGISNQDWLAYIQELRNGRSSDDEATADSQHAAPPKKKRKVGGSGGSGGSGGSGGSGGSGGSGGSLEHHHHHH

SEQ ID NO: 60 - protein, 1363 aa, Artificial Sequence
  Description of Artificial Sequence: Synthetic polypeptide
MTQFEGFTNLYQVSKTLRFELIPQGKTLKHIQEQGFIEEDKARNDHYKELKPIIDRIYKTYADQCLQLVQLDWENLSAAIDSYRKEKTEETRNALIEEQATYRNAIHDYFIGRTDNLTDAINKRHAEIYKGLFKAELFNGKVLKQLGTVTTTEHENALLRSFDKFTTYFSGFYENRKNVFSAEDISTAIPHRIVQDNFPKFKENCHIFTRLITAVPSLREHFENVKKAIGIFVSTSIEEVFSFPFYNQLLTQTQIDLYNQLLGGISREAGTEKIKGLNEVLNLAIQKNDETAHIIASLPHRFIPLFKQILSDRNTLSFILEEFKSDEEVIQSFCKYKTLLRNENVLETAEALFNELNSIDLTHIFISHKKLETISSALCDHWDTLRNALYERRISELTGKITKSAKEKVQRSLKHEDINLQEIISAAGKELSEAFKQKTSEILSHAHAALDQPLPTTLKKQEEKEILKSQLDSLLGLYHLLDWFAVDESNEVDPEFSARLTGIKLEMEPSLSFYNKARNYATKKPYSVEKFKLNFQMPTLASGWDVNKEKNNGAILFVKNGLYYLGIMPKQKGRYKALSFEPTEKTSEGFDKMYYDYFPDAAKMIPKCSTQLKAVTAHFQTHTTPILLSNNFIEPLEITKEIYDLNNPEKEPKKFQTAYAKKTGDQKGYREALCKWIDFTRDFLSKYTKTTSIDLSSLRPSSQYKDLGEYYAELNPLLYHISFQRIAEKEIMDAVETGKLYLFQIYNKDFAKGHHGKPNLHTLYWTGLFSPENLAKTSIKLNGQAELFYRPKSRMKRMAHRLGEKMLNKKLKDQKTPIPDTLYQELYDYVNHRLSHDLSDEARALLPNVITKEVSHEIIKDRRFTSDKFFFHVPITLNYQAANSPSKFNQRVNAYLKEHPETPIIGIDRGERNLIYITVIDSTGKILEQRSLNTIQQFDYQKKLDNREKERVAARQAWSVVGTIKDLKQGYLSQVIHEIVDLMIHYQAVVVLENLNFGFKSKRTGIAEKAVYQQFEKMLIDKLNCLVLKDYPAEKVGGVLNPYQLTDQFTSFAKMGTQSGFLFYVPAPYTSKIDPLTGFVDPFVWKTIKNHESRKHFLEGFDFLHYDVKTGDFILHFKMNRNLSFQRGLPGFMPAWDIVFEKNETQFDAKGTPFIAGKRIVPVIENHRFTGRYRDLYPANELIALLEEKGIVFRDGSNILPKLLENDDSHAIDTMVALIRSVLQMRNSNAATGEDYINSPVRDLNGVCFDSRFQNPEWPMDADANGAYHIALKGQLLLNHLKESKDLKLQNGISNQDWLAYIQELRNGRSSDDEATADSQHAAPPKKKRKVGGSGGSGGSGGSGGSGGSGGSGGSLEHHHHHH

SEQ ID NO: 61 - protein, 1363 aa, Artificial Sequence
  Description of Artificial Sequence: Synthetic polypeptide
MTQFEGFTNLYQVSKTLRFELIPQGKTLKHIQEQGFIEEDKARNDHYKELKPIIDRIYKTYADQCLQLVQLDWENLSAAIDSYRKEKTEETRNALIEEQATYRNAIHDYFIGRTDNLTDAINKRHAEIYKGLFKAELFNGKVLKQLGTVTTTEHENALLRSFDKFTTYFSGFYENRKNVFSAEDISTAIPHRIVQDNFPKFKENCHIFTRLITAVPSLREHFENVKKAIGIFVSTSIEEVFSFPFYNQLLTQTQIDLYNQLLGGISREAGTEKIKGLNEVLNLAIQKNDETAHIIASLPHRFIPLFKQILSDRNTLSFILEEFKSDEEVIQSFCKYKTLLRNENVLETAEALFNELNSIDLTHIFISHKKLETISSALCDHWDTLRNALYERRISELTGKITKSAKEKVQRSLKHEDINLQEIISAAGKELSEAFKQKTSEILSHAHAALDQPLPTTLKKQEEKEILKSQLDSLLGLYHLLDWFAVDESNEVDPEFSARLTGIKLEMEPSLSFYNKARNYATKKPYSVEKFKLNFQRPTLASGWDVNKEKNNGAILFVKNGLYYLGIMPKQKGRYKALSFEPTEKTSEGFDKMYYDYFPDAAKMIPKCSTQLKAVTAHFQTHTTPILLSNNFIEPLEITKEIYDLNNPEKEPKKFQTAYAKKTGDQKGYREALCKWIDFTRDFLSKYTKTTSIDLSSLRPSSQYKDLGEYYAELNPLLYHISFQRIAEKEIMDAVETGKLYLFQIYNKDFAKGHHGKPNLHTLYWTGLFSPENLAKTSIKLNGQAELFYRPKSRMKRMAARLGEKMLNKKLKDQKTPIPDTLYQELYDYVNHRLSHDLSDEARALLPNVITKEVSHEIIKDRRFTSDKFLFHVPITLNYQAANSPSKFNQRVNAYLKEHPETPIIGIDRGERNLIYITVIDSTGKILEQRSLNTIQQFDYQKKLDNREKERVAARQAWSVVGTIKDLKQGYLSQVIHEIVDLMIHYQAVVVLENLNFGFKSKRTGIAEKAVYQQFEKMLIDKLNCLVLKDYPAEKVGGVLNPYQLTDQFTSFAKMGTQSGFLFYVPAPYTSKIDPLTGFVDPFVWKTIKNHESRKHFLEGFDFLHYDVKTGDFILHFKMNRNLSFQRGLPGFMPAWDIVFEKNETQFDAKGTPFIAGKRIVPVIENHRFTGRYRDLYPANELIALLEEKGIVFRDGSNILPKLLENDDSHAIDTMVALIRSVLQMRNSNAATGEDYINSPVRDLNGVCFDSRFQNPEWPMDADANGAYHIALKGQLLLNHLKESKDLKLQNGISNQDWLAYIQELRNGRSSDDEATADSQHAAPPKKKRKVGGSGGSGGSGGSGGSGGSGGSGGSLEHHHHHH

SEQ ID NO: 62 - protein, 1331 aa, Artificial Sequence
  Description of Artificial Sequence: Synthetic polypeptide
MTQFEGFTNLYQVSKTLRFELIPQGKTLKHIQEQGFIEEDKARNDHYKELKPIIDRIYKTYADQCLQLVQLDWENLSAAIDSYRKEKTEETRNALIEEQATYRNAIHDYFIGRTDNLTDAINKRHAEIYKGLFKAELFNGKVLKQLGTVTTTEHENALLRSFDKFTTYFSGFYENRKNVFSAEDISTAIPHRIVQDNFPKFKENCHIFTRLITAVPSLREHFENVKKAIGIFVSTSIEEVFSFPFYNQLLTQTQIDLYNQLLGGISREAGTEKIKGLNEVLNLAIQKNDETAHIIASLPHRFIPLFKQILSDRNTLSFILEEFKSDEEVIQSFCKYKTLLRNENVLETAEALFNELNSIDLTHIFISHKKLETISSALCDHWDTLRNALYERRISELTGKITKSAKEKVQRSLKHEDINLQEIISAAGKELSEAFKQKTSEILSHAHAALDQPLPTTLKKQEEKEILKSQLDSLLGLYHLLDWFAVDESNEVDPEFSARLTGIKLEMEPSLSFYNKARNYATKKPYSVEKFKLNFQRPTLASGWDVNKEKNNGAILFVKNGLYYLGIMPKQKGRYKALSFEPTEKTSEGFDKMYYDYFPDAAKMIPKCSTQLKAVTAHFQTHTTPILLSNNFIEPLEITKEIYDLNNPEKEPKKFQTAYAKKTGDQKGYREALCKWIDFTRDFLSKYTKTTSIDLSSLRPSSQYKDLGEYYAELNPLLYHISFQRIAEKEIMDAVETGKLYLFQIYNKDFAKGHHGKPNLHTLYWTGLFSPENLAKTSIKLNGQAELFYRPKSRMKRMAARLGEKMLNKKLKDQKTPIPDTLYQELYDYVNHRLSHDLSDEARALLPNVITKEVSHEIIKDRRFTSDKFLFHVPITLNYQAANSPSKFNQRVNAYLKEHPETPIIGIDRGERNLIYITVIDSTGKILEQRSLNTIQQFDYQKKLDNREKERVAARQAWSVVGTIKDLKQGYLSQVIHEIVDLMIHYQAVVVLENLNFGFKSKRTGIAEKAVYQQFEKMLIDKLNCLVLKDYPAEKVGGVLNPYQLTDQFTSFAKMGTQSGFLFYVPAPYTSKIDPLTGFVDPFVWKTIKNHESRKHFLEGFDFLHYDVKTGDFILHFKMNRNLSFQRGLPGFMPAWDIVFEKNETQFDAKGTPFIAGKRIVPVIENHRFTGRYRDLYPANELIALLEEKGIVFRDGSNILPKLLENDDSHAIDTMVALIRSVLQMRNSNAATGEDYINSPVRDLNGVCFDSRFQNPEWPMDADANGAYHIALKGQLLLNHLKESKDLKLQNGISNQDWLAYIQELRNGRSSDDEATADSQHAAPPKKKRKV

SEQ ID NO: 63 - protein, 1331 aa, Artificial Sequence
  Description of Artificial Sequence: Synthetic polypeptide
MTQFEGFTNLYQVSKTLRFELIPQGKTLKHIQEQGFIEEDKARNDHYKELKPIIDRIYKTYADQCLQLVQLDWENLSAAIDSYRKEKTEETRNALIEEQATYRNAIHDYFIGRTDNLTDAINKRHAEIYKGLFKAELFNGKVLKQLGTVTTTEHENALLRSFDKFTTYFSGFYENRKNVFSAEDISTAIPHRIVQDNFPKFKENCHIFTRLITAVPSLREHFENVKKAIGIFVSTSIEEVFSFPFYNQLLTQTQIDLYNQLLGGISREAGTEKIKGLNEVLNLAIQKNDETAHIIASLPHRFIPLFKQILSDRNTLSFILEEFKSDEEVIQSFCKYKTLLRNENVLETAEALFNELNSIDLTHIFISHKKLETISSALCDHWDTLRNALYERRISELTGKITKSAKEKVQRSLKHEDINLQEIISAAGKELSEAFKQKTSEILSHAHAALDQPLPTTLKKQEEKEILKSQLDSLLGLYHLLDWFAVDESNEVDPEFSARLTGIKLEMEPSLSFYNKARNYATKKPYSVEKFKLNFQRPTLASGWDVNKEKNNGAILFVKNGLYYLGIMPKQKGRYKALSFEPTEKTSEGFDKMYYDYFPDAAKMIPKCSTQLKAVTAHFQTHTTPILLSNNFIEPLEITKEIYDLNNPEKEPKKFQTAYAKKTGDQKGYREALCKWIDFTRDFLSKYTKTTSIDLSSLRPSSQYKDLGEYYAELNPLLYHISFQRIAEKEIMDAVETGKLYLFQIYNKDFAKGHHGKPNLHTLYWTGLFSPENLAKTSIKLNGQAELFYRPKSRMKRMAHRLGEKMLNKKLKDQKTPIPDTLYQELYDYVNHRLSHDLSDEARALLPNVITKEVSHEIIKDRRFTSDKFLFHVPITLNYQAANSPSKFNQRVNAYLKEHPETPIIGIDRGERNLIYITVIDSTGKILEQRSLNTIQQFDYQKKLDNREKERVAARQAWSVVGTIKDLKQGYLSQVIHEIVDLMIHYQAVVVLENLNFGFKSKRTGIAEKAVYQQFEKMLIDKLNCLVLKDYPAEKVGGVLNPYQLTDQFTSFAKMGTQSGFLFYVPAPYTSKIDPLTGFVDPFVWKTIKNHESRKHFLEGFDFLHYDVKTGDFILHFKMNRNLSFQRGLPGFMPAWDIVFEKNETQFDAKGTPFIAGKRIVPVIENHRFTGRYRDLYPANELIALLEEKGIVFRDGSNILPKLLENDDSHAIDTMVALIRSVLQMRNSNAATGEDYINSPVRDLNGVCFDSRFQNPEWPMDADANGAYHIALKGQLLLNHLKESKDLKLQNGISNQDWLAYIQELRNGRSSDDEATADSQHAAPPKKKRKV

SEQ ID NO: 64 - protein, 1363 aa, Artificial Sequence; identical to SEQ ID NO: 59
  Description of Artificial Sequence: Synthetic polypeptide

SEQ ID NO: 65 - protein, 1361 aa, Artificial Sequence
  Description of Artificial Sequence: Synthetic polypeptide
MGRDPGKPIPNPLLGLDSTAPKKKRKVGIHGVPAATQFEGFTNLYQVSKTLRFELIPQGKTLKHIQEQGFIEEDKARNDHYKELKPIIDRIYKTYADQCLQLVQLDWENLSAAIDSYRKEKTEETRNALIEEQATYRNAIHDYFIGRTDNLTDAINKRHAEIYKGLFKAELFNGKVLKQLGTVTTTEHENALLRSFDKFTTYFSGFYENRKNVFSAEDISTAIPHRIVQDNFPKFKENCHIFTRLITAVPSLREHFENVKKAIGIFVSTSIEEVFSFPFYNQLLTQTQIDLYNQLLGGISREAGTEKIKGLNEVLNLAIQKNDETAHIIASLPHRFIPLFKQILSDRNTLSFILEEFKSDEEVIQSFCKYKTLLRNENVLETAEALFNELNSIDLTHIFISHKKLETISSALCDHWDTLRNALYERRISELTGKITKSAKEKVQRSLKHEDINLQEIISAAGKELSEAFKQKTSEILSHAHAALDQPLPTTLKKQEEKEILKSQLDSLLGLYHLLDWFAVDESNEVDPEFSARLTGIKLEMEPSLSFYNKARNYATKKPYSVEKFKLNFQMPTLASGWDVNKEKNNGAILFVKNGLYYLGIMPKQKGRYKALSFEPTEKTSEGFDKMYYDYFPDAAKMIPKCSTQLKAVTAHFQTHTTPILLSNNFIEPLEITKEIYDLNNPEKEPKKFQTAYAKKTGDQKGYREALCKWIDFTRDFLSKYTKTTSIDLSSLRPSSQYKDLGEYYAELNPLLYHISFQRIAEKEIMDAVETGKLYLFQIYNKDFAKGHHGKPNLHTLYWTGLFSPENLAKTSIKLNGQAELFYRPKSRMKRMAHRLGEKMLNKKLKDQKTPIPDTLYQELYDYVNHRLSHDLSDEARALLPNVITKEVSHEIIKDRRFTSDKFFFHVPITLNYQAANSPSKFNQRVNAYLKEHPETPIIGIDRGERNLIYITVIDSTGKILEQRSLNTIQQFDYQKKLDNREKERVAARQAWSVVGTIKDLKQGYLSQVIHEIVDLMIHYQAVVVLENLNFGFKSKRTGIAEKAVYQQFEKMLIDKLNCLVLKDYPAEKVGGVLNPYQLTDQFTSFAKMGTQSGFLFYVPAPYTSKIDPLTGFVDPFVWKTIKNHESRKHFLEGFDFLHYDVKTGDFILHFKMNRNLSFQRGLPGFMPAWDIVFEKNETQFDAKGTPFIAGKRIVPVIENHRFTGRYRDLYPANELIALLEEKGIVFRDGSNILPKLLENDDSHAIDTMVALIRSVLQMRNSNAATGEDYINSPVRDLNGVCFDSRFQNPEWPMDADANGAYHIALKGQLLLNHLKESKDLKLQNGISNQDWLAYIQELRNPKKKRKVKLAAALEHHHHHH

SEQ ID NO: 66 - protein, 1307 aa, Acidaminococcus sp.
MTQFEGFTNLYQVSKTLRFELIPQGKTLKHIQEQGFIEEDKARNDHYKELKPIIDRIYKTYADQCLQLVQLDWENLSAAIDSYRKEKTEETRNALIEEQATYRNAIHDYFIGRTDNLTDAINKRHAEIYKGLFKAELFNGKVLKQLGTVTTTEHENALLRSFDKFTTYFSGFYENRKNVFSAEDISTAIPHRIVQDNFPKFKENCHIFTRLITAVPSLREHFENVKKAIGIFVSTSIEEVFSFPFYNQLLTQTQIDLYNQLLGGISREAGTEKIKGLNEVLNLAIQKNDETAHIIASLPHRFIPLFKQILSDRNTLSFILEEFKSDEEVIQSFCKYKTLLRNENVLETAEALFNELNSIDLTHIFISHKKLETISSALCDHWDTLRNALYERRISELTGKITKSAKEKVQRSLKHEDINLQEIISAAGKELSEAFKQKTSEILSHAHAALDQPLPTTLKKQEEKEILKSQLDSLLGLYHLLDWFAVDESNEVDPEFSARLTGIKLEMEPSLSFYNKARNYATKKPYSVEKFKLNFQMPTLASGWDVNKEKNNGAILFVKNGLYYLGIMPKQKGRYKALSFEPTEKTSEGFDKMYYDYFPDAAKMIPKCSTQLKAVTAHFQTHTTPILLSNNFIEPLEITKEIYDLNNPEKEPKKFQTAYAKKTGDQKGYREALCKWIDFTRDFLSKYTKTTSIDLSSLRPSSQYKDLGEYYAELNPLLYHISFQRIAEKEIMDAVETGKLYLFQIYNKDFAKGHHGKPNLHTLYWTGLFSPENLAKTSIKLNGQAELFYRPKSRMKRMAHRLGEKMLNKKLKDQKTPIPDTLYQELYDYVNHRLSHDLSDEARALLPNVITKEVSHEIIKDRRFTSDKFFFHVPITLNYQAANSPSKFNQRVNAYLKEHPETPIIGIDRGERNLIYITVIDSTGKILEQRSLNTIQQFDYQKKLDNREKERVAARQAWSVVGTIKDLKQGYLSQVIHEIVDLMIHYQAVVVLENLNFGFKSKRTGIAEKAVYQQFEKMLIDKLNCLVLKDYPAEKVGGVLNPYQLTDQFTSFAKMGTQSGFLFYVPAPYTSKIDPLTGFVDPFVWKTIKNHESRKHFLEGFDFLHYDVKTGDFILHFKMNRNLSFQRGLPGFMPAWDIVFEKNETQFDAKGTPFIAGKRIVPVIENHRFTGRYRDLYPANELIALLEEKGIVFRDGSNILPKLLENDDSHAIDTMVALIRSVLQMRNSNAATGEDYINSPVRDLNGVCFDSRFQNPEWPMDADANGAYHIALKGQLLLNHLKESKDLKLQNGISNQDWLAYIQELRN

SEQ ID NO: 67 - RNA, 10 nt, Artificial Sequence
  Description of Artificial Sequence: Synthetic oligonucleotide
aagaccuuuu

SEQ ID NO: 68 - RNA, 25 nt, Artificial Sequence
  Description of Artificial Sequence: Synthetic oligonucleotide
auguguuuuugucaaaagaccuuuu

SEQ ID NO: 69 - RNA, 60 nt, Artificial Sequence
  Description of Artificial Sequence: Synthetic oligonucleotide
aggccagcuugccgguuuuuuagucgugcugcuucauguguuuuugucaaaagaccuuuu

SEQ ID NO: 70 - DNA, 10 bp, Artificial Sequence
  Description of Artificial Sequence: Synthetic oligonucleotide
aagacctttt

SEQ ID NO: 71 - DNA, 25 bp, Artificial Sequence
  Description of Artificial Sequence: Synthetic oligonucleotide
atgtgtttttgtcaaaagacctttt

SEQ ID NO: 72 - DNA, 60 bp, Artificial Sequence
  Description of Artificial Sequence: Synthetic oligonucleotide
aggccagcttgccggttttttagtcgtgctgcttcatgtgtttttgtcaaaagacctttt

SEQ ID NO: 73 - DNA, 20 bp, Artificial Sequence
  Description of Artificial Sequence: Synthetic oligonucleotide
tttttgtcaaaagacctttt

SEQ ID NO: 74 - DNA, 30 bp, Artificial Sequence
  Description of Artificial Sequence: Synthetic oligonucleotide
gcttcatgtgtttttgtcaaaagacctttt

SEQ ID NO: 75 - DNA, 50 bp, Artificial Sequence
  Description of Artificial Sequence: Synthetic oligonucleotide
gccggttttttagtcgtgctgcttcatgtgtttttgtcaaaagacctttt

SEQ ID NO: 76 - DNA, 40 bp, Artificial Sequence
  Description of Artificial Sequence: Synthetic oligonucleotide
tagtcgtgctgcttcatgtgtttttgtcaaaagacctttt

SEQ ID NO: 77 - DNA, 20 bp, Artificial Sequence
  Description of Artificial Sequence: Synthetic oligonucleotide
ccgaagttttcttcggtttt

SEQ ID NO: 78 - DNA, 25 bp, Artificial Sequence
  Description of Artificial Sequence: Synthetic oligonucleotide
tttttccgaagttttcttcggtttt

SEQ ID NO: 79 - DNA, 30 bp, Artificial Sequence
  Description of Artificial Sequence: Synthetic oligonucleotide
aacgctttttccgaagttttcttcggtttt

SEQ ID NO: 80 - DNA, 41 bp, Artificial Sequence
  Description of Artificial Sequence: Synthetic oligonucleotide
gcgttgttttcaacgctttttccgaagttttcttcggtttt

SEQ ID NO: 81 - DNA, 62 bp, Artificial Sequence
  Description of Artificial Sequence: Synthetic oligonucleotide
ggcttcttttgaagcctttttgcgttgttttcaacgctttttccgaagttttcttcggtttt

SEQ ID NO: 82 - DNA, 25 bp, Artificial Sequence
  Description of Artificial Sequence: Synthetic oligonucleotide
atgtgtttttgtcaaaagacctttt

SEQ ID NO: 83 - RNA, 25 nt, Artificial Sequence
  Description of Artificial Sequence: Synthetic oligonucleotide
aaaaaaaaaaaaaaaaaaaaaaaaa

SEQ ID NO: 84 - DNA, 25 bp, Artificial Sequence
  Description of Artificial Sequence: Synthetic oligonucleotide
ttttttttttttttttttttttttt

SEQ ID NO: 85 - RNA, 25 nt, Artificial Sequence
  Description of Artificial Sequence: Synthetic oligonucleotide
auguguuuuugucaaaagaccuuuu

SEQ ID NO: 86 - RNA, 25 nt, Artificial Sequence
  Description of Artificial Sequence: Synthetic oligonucleotide
aaaaaaaaaaaaaaaaaaaaaaaaa

SEQ ID NO: 87 - RNA, 25 nt, Artificial Sequence
  Description of Artificial Sequence: Synthetic oligonucleotide
uuuuuuuuuuuuuuuuuuuuuuuuu

SEQ ID NO: 88 - DNA, 20 bp, Artificial Sequence
  Description of Artificial Sequence: Synthetic oligonucleotide
tctgcagaaatgttccccgt

SEQ ID NO: 89 - RNA, 20 nt, Artificial Sequence
  Description of Artificial Sequence: Synthetic oligonucleotide
ucugcagaaauguuccccgu

SEQ ID NO: 90 - RNA, 20 nt, Artificial Sequence
  Description of Artificial Sequence: Synthetic oligonucleotide
uaauuucuacucuuguagau

SEQ ID NO: 91 - RNA, 40 nt, Artificial Sequence
  Description of Artificial Sequence: Synthetic oligonucleotide
uaauuucuacucuuguagauucugcagaaauguuccccgu

SEQ ID NO: 92 - DNA, 65 bp, Artificial Sequence
  Description of Artificial Sequence: Synthetic oligonucleotide
  Description of Combined DNA/RNA Molecule: Synthetic oligonucleotide
atgtgtttttgtcaaaagaccttttuaauuucuacucuuguagauucugcagaaauguuccccgu

SEQ ID NO: 93 - RNA, 41 nt, Artificial Sequence
  Description of Artificial Sequence: Synthetic oligonucleotide
uaauuucuacucuuguagauaucuucuagguaugacaacga

SEQ ID NO: 94 - RNA, 21 nt, Artificial Sequence
  Description of Artificial Sequence: Synthetic oligonucleotide
ugagccagccaccagagggcg

SEQ ID NO: 95 - RNA, 21 nt, Artificial Sequence
  Description of Artificial Sequence: Synthetic oligonucleotide
aucuucuagguaugacaacga

SEQ ID NO: 96 - RNA, 21 nt, Artificial Sequence
  Description of Artificial Sequence: Synthetic oligonucleotide
gcuacagcaacaggguggugg

SEQ ID NO: 97 - RNA, 21 nt, Artificial Sequence
  Description of Artificial Sequence: Synthetic oligonucleotide
ccauaauuuccuuucaaggug

SEQ ID NO: 98 - RNA, 21 nt, Artificial Sequence
  Description of Artificial Sequence: Synthetic oligonucleotide
cuuucaagguggggagggagg

SEQ ID NO: 99 - RNA, 21 nt, Artificial Sequence
  Description of Artificial Sequence: Synthetic oligonucleotide
aagguggggagggagguagag

SEQ ID NO: 100 - RNA, 21 nt, Artificial Sequence
  Description of Artificial Sequence: Synthetic oligonucleotide
gcagaccacaguccaugccau

SEQ ID NO: 101 - RNA, 21 nt, Artificial Sequence
  Description of Artificial Sequence: Synthetic oligonucleotide
cagaccacaguccaugccauc

SEQ ID NO: 102 - RNA, 21 nt, Artificial Sequence
  Description of Artificial Sequence: Synthetic oligonucleotide
ccggaggggccauccacaguc

SEQ ID NO: 103 - RNA, 21 nt, Artificial Sequence
  Description of Artificial Sequence: Synthetic oligonucleotide
uagacggcaggucagguccac

SEQ ID NO: 104 - RNA, 21 nt, Artificial Sequence
  Description of Artificial Sequence: Synthetic oligonucleotide
cuagacggcaggucaggucca

SEQ ID NO: 105 - RNA, 21 nt, Artificial Sequence
  Description of Artificial Sequence: Synthetic oligonucleotide
ucuagacggcaggucaggucc

SEQ ID NO: 106 - RNA, 21 nt, Artificial Sequence
  Description of Artificial Sequence: Synthetic oligonucleotide
gcagguuuuucuagacggcag

SEQ ID NO: 107 - RNA, 21 nt, Artificial Sequence
  Description of Artificial Sequence: Synthetic oligonucleotide
ucaagcucauuuccugguaug

SEQ ID NO: 108 - RNA, 21 nt, Artificial Sequence
  Description of Artificial Sequence: Synthetic oligonucleotide
cugguauguggcuggggccag

SEQ ID NO: 109 - RNA, 21 nt, Artificial Sequence
  Description of Artificial Sequence: Synthetic oligonucleotide
agagccagucucuggccccag

SEQ ID NO: 110 - RNA, 21 nt, Artificial Sequence
  Description of Artificial Sequence: Synthetic oligonucleotide
aagagccagucucuggcccca

SEQ ID NO: 111 - RNA, 21 nt, Artificial Sequence
  Description of Artificial Sequence: Synthetic oligonucleotide
uaagagccagucucuggcccc

SEQ ID NO: 112 - RNA, 21 nt, Artificial Sequence
  Description of Artificial Sequence: Synthetic oligonucleotide
cugagccagccaccagagggc

SEQ ID NO: 113 - RNA, 21 nt, Artificial Sequence
  Description of Artificial Sequence: Synthetic oligonucleotide
ucugagccagccaccagaggg

SEQ ID NO: 114 - RNA, 21 nt, Artificial Sequence
  Description of Artificial Sequence: Synthetic oligonucleotide
caucuucuagguaugacaacg

SEQ ID NO: 115 - RNA, 21 nt, Artificial Sequence
  Description of Artificial Sequence: Synthetic oligonucleotide
uugaugguacaugacaaggug

SEQ ID NO: 116 - RNA, 21 nt, Artificial Sequence
  Description of Artificial Sequence: Synthetic oligonucleotide
gaggcccuacccucagucuga

SEQ ID NO: 117 - RNA, 21 nt, Artificial Sequence
  Description of Artificial Sequence: Synthetic oligonucleotide
ccucuccucgcuccaguccua

SEQ ID NO: 118 - RNA, 21 nt, Artificial Sequence
  Description of Artificial Sequence: Synthetic oligonucleotide
cucuccucgcuccaguccuag

SEQ ID NO: 119 - RNA, 21 nt, Artificial Sequence
  Description of Artificial Sequence: Synthetic oligonucleotide
gccaacagcagauagccuagg

SEQ ID NO: 120 - RNA, 21 nt, Artificial Sequence
  Description of Artificial Sequence: Synthetic oligonucleotide
ugugcccucgugucuuaucug

SEQ ID NO: 121 - RNA, 21 nt, Artificial Sequence
  Description of Artificial Sequence: Synthetic oligonucleotide
ccuagaugaauccugcuugaa

SEQ ID NO: 122 - RNA, 21 nt, Artificial Sequence
  Description of Artificial Sequence: Synthetic oligonucleotide
gguacuugguuuaccuagaug

SEQ ID NO: 123 - RNA, 21 nt, Artificial Sequence
  Description of Artificial Sequence: Synthetic oligonucleotide
agguacuugguuuaccuagau

SEQ ID NO: 124 - RNA, 21 nt, Artificial Sequence
  Description of Artificial Sequence: Synthetic oligonucleotide
aaacauuauauaguccuuacc

SEQ ID NO: 125 - RNA, 21 nt, Artificial Sequence
  Description of Artificial Sequence: Synthetic oligonucleotide
uaaacauuauauaguccuuac

SEQ ID NO: 126 - RNA, 21 nt, Artificial Sequence
  Description of Artificial Sequence: Synthetic oligonucleotide
ccgauuuuuaaacauuauaua

SEQ ID NO: 127 - RNA, 21 nt, Artificial Sequence
  Description of Artificial Sequence: Synthetic oligonucleotide
accgauuuuuaaacauuauau

SEQ ID NO: 128 - RNA, 21 nt, Artificial Sequence
  Description of Artificial Sequence: Synthetic oligonucleotide
uaccgauuuuuaaacauuaua

SEQ ID NO: 129 - RNA, 21 nt, Artificial Sequence
  Description of Artificial Sequence: Synthetic oligonucleotide
aaaaucgguaaaaaugcccac

SEQ ID NO: 130 - RNA, 21 nt, Artificial Sequence
  Description of Artificial Sequence: Synthetic oligonucleotide
gaggaagaugaacugagaugu

SEQ ID NO: 131 - RNA, 21 nt, Artificial Sequence
  Description of Artificial Sequence: Synthetic oligonucleotide
aggaagaugaacugagaugug

SEQ ID NO: 132 - RNA, 21 nt, Artificial Sequence
  Description of Artificial Sequence: Synthetic oligonucleotide
uggcugcugccccuguggcug

SEQ ID NO: 133 - RNA, 21 nt, Artificial Sequence
  Description of Artificial Sequence: Synthetic oligonucleotide
gucucuuugacuaaucaccaa

SEQ ID NO: 134 - RNA, 21 nt, Artificial Sequence
  Description of Artificial Sequence: Synthetic oligonucleotide
acuaaucaccaaaaagcaacc

SEQ ID NO: 135 - RNA, 21 nt, Artificial Sequence
  Description of Artificial Sequence: Synthetic oligonucleotide
gugauuagucaaagagaccaa

SEQ ID NO: 136 - RNA, 21 nt, Artificial Sequence
  Description of Artificial Sequence: Synthetic oligonucleotide
uucuccacguucuucucggcc

SEQ ID NO: 137 - RNA, 21 nt, Artificial Sequence
  Description of Artificial Sequence: Synthetic oligonucleotide
ucaauuuucuucuccacguuc

SEQ ID NO: 138 - RNA, 21 nt, Artificial Sequence
  Description of Artificial Sequence: Synthetic oligonucleotide
cguagccucugccaagaauaa

SEQ ID NO: 139 - RNA, 21 nt, Artificial Sequence
  Description of Artificial Sequence: Synthetic oligonucleotide
uugggcucagaccaggagucc

SEQ ID NO: 140 - RNA, 21 nt, Artificial Sequence
  Description of Artificial Sequence: Synthetic oligonucleotide
auucaugagaucuauacuguu

SEQ ID NO: 141 - RNA, 21 nt, Artificial Sequence
  Description of Artificial Sequence: Synthetic oligonucleotide
caacaguauagaucucaugaa

SEQ ID NO: 142 - RNA, 21 nt, Artificial Sequence
  Description of Artificial Sequence: Synthetic oligonucleotide
aagcguuuuccaacaguauag

SEQ ID NO: 143 - RNA, 21 nt, Artificial Sequence
  Description of Artificial Sequence: Synthetic oligonucleotide
ccucuuugaagcguuuuccaa

SEQ ID NO: 144 - RNA, 21 nt, Artificial Sequence
  Description of Artificial Sequence: Synthetic oligonucleotide
aagggccacaggaaguuauuu

SEQ ID NO: 145 - RNA, 21 nt, Artificial Sequence
  Description of Artificial Sequence: Synthetic oligonucleotide
uucauuccaccucguggagaa

SEQ ID NO: 146 - RNA, 21 nt, Artificial Sequence
  Description of Artificial Sequence: Synthetic oligonucleotide
guagaagguggagaugcuggc

SEQ ID NO: 147 - RNA, 21 nt, Artificial Sequence
  Description of Artificial Sequence: Synthetic oligonucleotide
ucaggaugaggucucucaccu

SEQ ID NO: 148 - RNA, 21 nt, Artificial Sequence
  Description of Artificial Sequence: Synthetic oligonucleotide
aaaugcuucauaaauuucugc

SEQ ID NO: 149 - RNA, 21 nt, Artificial Sequence
  Description of Artificial Sequence: Synthetic oligonucleotide
ugcucugacuuuagcaccuaa

SEQ ID NO: 150 - RNA, 21 nt, Artificial Sequence
  Description of Artificial Sequence: Synthetic oligonucleotide
aaaacaucuacccuauucuaa

SEQ ID NO: 151 - RNA, 21 nt, Artificial Sequence
  Description of Artificial Sequence: Synthetic oligonucleotide
ccccucugcuucgucuuucuc

SEQ ID NO: 152 - RNA, 21 nt, Artificial Sequence
  Description of Artificial Sequence: Synthetic oligonucleotide
uccacccccgggagaccacga

SEQ ID NO: 153 - RNA, 21 nt, Artificial Sequence
  Description of Artificial Sequence: Synthetic oligonucleotide
augugccuguucucaaccucu

SEQ ID NO: 154 - RNA, 21 nt, Artificial Sequence
  Description of Artificial Sequence: Synthetic oligonucleotide
caguaugagggcaccuacaag

SEQ ID NO: 155 - RNA, 21 nt, Artificial Sequence
  Description of Artificial Sequence: Synthetic oligonucleotide
ccgccuuaaauccacagcaua

SEQ ID NO: 156 - RNA, 21 nt, Artificial Sequence
  Description of Artificial Sequence: Synthetic oligonucleotide
uaaccaagugcucuguaguuu

SEQ ID NO: 157 - RNA, 21 nt, Artificial Sequence
  Description of Artificial Sequence: Synthetic oligonucleotide
gaccucuccaguguguuaaug

SEQ ID NO: 158 - DNA, 141 bp, Artificial Sequence
  Description of Artificial Sequence: Synthetic polynucleotide
cctgcaggcagctgcgcgctcgctcgctcactgaggccgcccgggcaaagcccgggcgtcgggcgacctttggtcgcccggcctcagtgagcgagcgagcgcgcagagagggagtggccaactccatcactaggggttcct

SEQ ID NO: 159 - DNA, 141 bp, Artificial Sequence
  Description of Artificial Sequence: Synthetic polynucleotide
aggaacccctagtgatggagttggccactccctctctgcgcgctcgctcgctcactgaggccgggcgaccaaaggtcgcccgacgcccgggctttgcccgggcggcctcagtgagcgagcgagcgcgcagctgcctgcagg

SEQ ID NO: 160 - protein, 159 aa, Artificial Sequence
  Description of Artificial Sequence: Synthetic polypeptide
MISLIAALAVDYVIGMENAMPWNLPADLAWFKRNTLNKPVIMGRHTWESIGRPLPGRKNIILSSQPSTDDRVTWVKSVDEAIAACGDVPEIMVIGGGRVIEQFLPKAQKLYLTHIDAEVEGDTHFPDYEPDDWESVFSEFHDADAQNSHSYCFEILERR

SEQ ID NO: 161 - DNA, 483 bp, Artificial Sequence
  Description of Artificial Sequence: Synthetic polynucleotide
ggtaccatcagtctgattgcggcgttagcggtagattacgttatcggcatggaaaacgccatgccgtggaacctgcctgccgatctcgcctggtttaaacgcaacaccttaaataaacccgtgattatgggccgccatacctgggaatcaatcggtcgtccgttgccaggacgcaaaaatattatcctcagcagtcaaccgagtacggacgatcgcgtaacgtgggtgaagtcggtggatgaagccatcgcggcgtgtggtgacgtaccagaaatcatggtgattggcggcggtcgcgttattgaacagttcttgccaaaagcgcaaaaactgtatctgacgcatatcgacgcagaagtggaaggcgacacccatttcccggattacgagccggatgactgggaatcggtattcagcgaattccacgatgctgatgcgcagaactctcacagctattgctttgagattctggagcggcgataa

SEQ ID NO: 162 - DNA, 474 bp, Artificial Sequence
  Description of Artificial Sequence: Synthetic polynucleotide
atcagtctgattgcggcgttagcggtagattacgttatcggcatggaaaacgccatgccgtggaacctgcctgccgatctcgcctggtttaaacgcaacaccttaaataaacccgtgattatgggccgccatacctgggaatcaatcggtcgtccgttgccaggacgcaaaaatattatcctcagcagtcaaccgagtacggacgatcgcgtaacgtgggtgaagtcggtggatgaagccatcgcggcgtgtggtgacgtaccagaaatcatggtgattggcggcggtcgcgttattgaacagttcttgccaaaagcgcaaaaactgtatctgacgcatatcgacgcagaagtggaaggcgacacccatttcccggattacgagccggatgactgggaatcggtattcagcgaattccacgatgctgatgcgcagaactctcacagctattgctttgagattctggagcggcga

SEQ ID NO: 163 - protein, 112 aa, Artificial Sequence
  Description of Artificial Sequence: Synthetic polypeptide
MGVEKQVIRPGNGPKPAPGQTVTVHCTGFGKDGDLSQKFWSTKDEGQKPFSFQIGKGAVIKGWDEGVIGMQIGEVARLRCSSDYAYGAGGFPAWGIQPNSVLDFEIEVLSVQ

SEQ ID NO: 164 - DNA, 78 bp, Artificial Sequence
  Description of Artificial Sequence: Synthetic oligonucleotide
tctggcggaggaagcggaggcggaggatctggtggtggtggatctggcggcggtggtagtggcggaggttctctgcaa

SEQ ID NO: 165 - DNA, 765 bp, Artificial Sequence
  Description of Artificial Sequence: Synthetic polynucleotide
atgtggcaactgctgctgcctacagctctgctgcttctggtgtctgccggcatgagaaccgaggatctgcctaaggccgtggtgttcctggaacctcagtggtacagagtgctggaaaaggacagcgtgaccctgaagtgccagggcgcctattctcccgaggacaatagcacccagtggttccacaacgagagcctgatcagcagccaggccagcagctactttatcgatgccgccaccgtggacgacagcggcgagtacagatgccagaccaatctgagcaccctgagcgaccctgtgcagctggaagtgcacattggatggttgctgctgcaagcccctagatgggtgttcaaagaagaggaccccatccacctgagatgccactcttggaagaacacagccctgcacaaagtgacctacctgcagaacggcaagggcagaaagtacttccaccacaacagcgacttctacatccccaaggccacactgaaggactccggctcctacttctgcagaggcctggtcggcagcaagaacgtgtccagcgagacagtgaacatcaccatcacacagggcctcgccgtgtctaccatcagcagctttttcccacctggctatcaggtgtccttctgcctggtcatggtgctgctgttcgccgtggataccggcctgtacttcagcgtcaagaccaacatccggtccagcaccagagactggaaggaccacaagttcaagtggcggaaggaccctcaggacaagtaa

SEQ ID NO: 166 - DNA, 762 bp, Artificial Sequence
  Description of Artificial Sequence: Synthetic polynucleotide
atgtggcagctgttgctgccgacagccctcctgttgctggtctccgctggcatgagaaccgaggatctgcctaaggccgtggtgttcctggaacctcagtggtacagagtgctggaaaaggacagcgtgaccctgaagtgccagggcgcctattctcccgaggacaatagcacccagtggttccacaacgagagcctgatcagcagccaggccagcagctactttatcgatgccgccaccgtggacgacagcggcgagtacagatgccagaccaatctgagcaccctgagcgaccctgtgcagctggaagtgcacattggatggttgctgctgcaagcccctagatgggtgttcaaagaagaggaccccatccacctgagatgccactcttggaagaacacagccctgcacaaagtgacctacctgcagaacggcaagggcagaaagtacttccaccacaacagcgacttctacatccccaaggccacactgaaggactccggctcctacttctgcagaggcctggtcggcagcaagaacgtgtccagcgagacagtgaacatcaccatcacacagggcctcgccgtgtctaccatcagcagctttttcccacctggctatcaggtgtccttctgcctggtcatggtgctgctgttcgccgtggataccggcctgtacttcagcgtcaagaccaacatccggtccagcaccagagactggaaggaccacaagttcaagtggcggaaggaccctcaggacaag

SEQ ID NO: 167 - DNA, 972 bp, Artificial Sequence
  Description of Artificial Sequence: Synthetic polynucleotide
atgtggcccctggtagcggcgctgttgctgggctcggcgtgctgcggatcagctcagctactatttaataaaacaaaatctgtagaattcacgttttgtaatgacactgtcgtcattccatgctttgttactaatatggaggcacaaaacactactgaagtatacgtaaagtggaaatttaaaggaagagatatttacacctttgatggagctctaaacaagtccactgtccccactgactttagtagtgcaaaaattgaagtctcacaattactaaaaggagatgcctctttgaagatggataagagtgatgctgtctcacacacaggaaactacacttgtgaagtaacagaattaaccagagaaggtgaaacgatcatcgagctaaaatatcgtgttgtttcatggttttctccaaatgaaaatattcttattgttattttcccaatttttgctatactcctgttctggggacagtttggtattaaaacacttaaatatagatccggtggtatggatgagaaaacaattgctttacttgttgctggactagtgatcactgtcattgtcattgttggagccattcttttcgtcccaggtgaatattcattaaagaatgctactggccttggtttaattgtgacttctacagggatattaatattacttcactactatgtgtttagtacagcgattggattaacctccttcgtcattgccatattggttattcaggtgatagcctatatcctcgctgtggttggactgagtctctgtattgcggcgtgtataccaatgcatggccctcttctgatttcaggtttgagtatcttagctctagcacaattacttggactagtttatatgaaatttgtggcttccaatcagaagactatacaacctcctaggaaagctgtagaggaaccccttaatgcattcaaagaatcaaaaggaatgatgaatgatgaatga

SEQ ID NO: 168 - DNA, 342 bp, Artificial Sequence
  Description of Artificial Sequence: Synthetic polynucleotide
aattgggtcaacgtgatcagcgacctgaagaagatcgaggacctgatccagagcatgcacatcgacgccacactgtacaccgagtccgatgtgcaccctagctgcaaagtgaccgccatgaagtgctttctgctggaactgcaagtgatcagcctggaaagcggcgacgccagcatccacgataccgtggaaaacctgatcatcctggccaacaacagcctgagcagcaacggcaatgtgaccgagagcggctgcaaagagtgcgaggaactggaagagaagaacatcaaagagttcctccagagcttcgtccacatcgtgcagatgttcatcaacaccagc

SEQ ID NO: 169 - DNA, 396 bp, Artificial Sequence
  Description of Artificial Sequence: Synthetic polynucleotide
atggattggacctggatcctgtttctggtggccgctgccacaagagtgcacagcaattgggtcaacgtgatcagcgacctgaagaagatcgaggacctgatccagagcatgcacatcgacgccacactgtacaccgagtccgatgtgcaccctagctgcaaagtgaccgccatgaagtgctttctgctggaactgcaagtgatcagcctggaaagcggcgacgccagcatccacgataccgtggaaaacctgatcatcctggccaacaacagcctgagcagcaacggcaatgtgaccgagagcggctgcaaagagtgcgaggaactggaagagaagaacatcaaagagttcctccagagcttcgtccacatcgtgcagatgttcatcaacaccagc

SEQ ID NO: 170 - DNA, 453 bp, Artificial Sequence
  Description of Artificial Sequence: Synthetic polynucleotide
atggactggacctggattctgttcctggtcgcggctgcaacgcgagtccatagcggtatccatgtttttattcttgggtgtttttctgctgggctgcctaagaccgaggccaactgggtaaatgtcatcagtgacctcaagaaaatagaagaccttatacaaagcatgcacattgatgctactctctacactgagtcagatgtacatccctcatgcaaagtgacggccatgaaatgtttcctcctcgaacttcaagtcatatctctggaaagtggcgacgcgtccatccacgacacggtcgaaaacctgataatactcgctaataatagtctctcttcaaatggtaacgtaaccgagtcaggttgcaaagagtgcgaagagttggaagaaaaaaacataaaggagttcctgcaaagtttcgtgcacattgtgcagatgttcattaatacctct

SEQ ID NO: 171 - DNA, 711 bp, Artificial Sequence
  Description of Artificial Sequence: Synthetic polynucleotide
atcacctgtcctccacctatgagcgtggaacacgccgacatctgggtcaagagctacagcctgtacagcagagagcggtacatctgcaacagcggcttcaagagaaaggccggcacaagcagcctgaccgagtgtgtgctgaacaaggccacaaacgtggcccactggaccacacctagcctgaagtgcatcagagatcccgctctggttcatcagaggcctgcccctccatctacagtgacaacagctggcgtgacccctcagcctgagtctctgtctccatctggaaaagagcctgccgccagctctcccagctctaacaatactgctgccaccacagccgctatcgtgcctggatctcagctgatgcctagcaagagccctagcaccggcacaacagagatcagctctcacgagagcagccacggaacaccttctcagaccaccgccaagaattgggagctgacagcctctgcctctcatcagccacctggcgtgtacccacagggccactctgatacaacagtggccatcagcaccagcaccgttctgctgtgtggcctgtctgctgttagcctgctggcctgctacctgaagtctagacagacacctcctctggccagcgtggaaatggaagccatggaagctctgcctgtcacatggggcaccagcagcagagatgaggacctcgagaattgcagccaccacctg

SEQ ID NO: 172 - DNA, 1185 bp, Artificial Sequence
  Description of Artificial Sequence: Synthetic polynucleotide
atggattggacctggatcctgtttctggtggccgctgccacaagagtgcacagcaattgggtcaacgtgatcagcgacctgaagaagatcgaggacctgatccagagcatgcacatcgacgccacactgtacaccgagtccgatgtgcaccctagctgcaaagtgaccgccatgaagtgctttctgctggaactgcaagtgatcagcctggaaagcggcgacgccagcatccacgataccgtggaaaacctgatcatcctggccaacaacagcctgagcagcaacggcaatgtgaccgagagcggctgcaaagagtgcgaggaactggaagagaagaacatcaaagagttcctccagagcttcgtccacatcgtgcagatgttcatcaacaccagctctggcggaggaagcggaggcggaggatctggtggtggtggatctggcggcggtggtagtggcggaggttctctgcaaatcacctgtcctccacctatgagcgtggaacacgccgacatctgggtcaagagctacagcctgtacagcagagagcggtacatctgcaacagcggcttcaagagaaaggccggcacaagcagcctgaccgagtgtgtgctgaacaaggccacaaacgtggcccactggaccacacctagcctgaagtgcatcagagatcccgctctggttcatcagaggcctgcccctccatctacagtgacaacagctggcgtgacccctcagcctgagtctctgtctccatctggaaaagagcctgccgccagctctcccagctctaacaatactgctgccaccacagccgctatcgtgcctggatctcagctgatgcctagcaagagccctagcaccggcacaacagagatcagctctcacgagagcagccacggaacaccttctcagaccaccgccaagaattgggagctgacagcctctgcctctcatcagccacctggcgtgtacccacagggccactctgatacaacagtggccatcagcaccagcaccgttctgctgtgtggcctgtctgctgttagcctgctggcctgctacctgaagtctagacagacacctcctctggccagcgtggaaatggaagccatggaagctctgcctgtcacatggggcaccagcagcagagatgaggacctcgagaattgcagccaccacctg

SEQ ID NO: 173 - DNA, 1242 bp, Artificial Sequence
  Description of Artificial Sequence: Synthetic polynucleotide
atggactggacctggattctgttcctggtcgcggctgcaacgcgagtccatagcggtatccatgtttttattcttgggtgtttttctgctgggctgcctaagaccgaggccaactgggtaaatgtcatcagtgacctcaagaaaatagaagaccttatacaaagcatgcacattgatgctactctctacactgagtcagatgtacatccctcatgcaaagtgacggccatgaaatgtttcctcctcgaacttcaagtcatatctctggaaagtggcgacgcgtccatccacgacacggtcgaaaacctgataatactcgctaataatagtctctcttcaaatggtaacgtaaccgagtcaggttgcaaagagtgcgaagagttggaagaaaaaaacataaaggagttcctgcaaagtttcgtgcacattgtgcagatgttcattaatacctctagcggcggaggatcaggtggcggtggaagcggaggtggaggctccggtggaggaggtagtggcggaggttctcttcaaataacttgtcctccaccgatgtccgtagaacatgcggatatttgggtaaaatcctatagcttgtacagccgagagcggtatatctgcaacagcggcttcaagcggaaggccggcacaagcagcctgaccgagtgcgtgctgaacaaggccaccaacgtggcccactggaccacccctagcctgaagtgcatcagagatcccgccctggtgcatcagcggcctgcccctccaagcacagtgacaacagctggcgtgaccccccagcctgagagcctgagcccttctggaaaagagcctgccgccagcagccccagcagcaacaatactgccgccaccacagccgccatcgtgcctggatctcagctgatgcccagcaagagccctagcaccggcaccaccgagatcagcagccacgagtctagccacggcaccccatctcagaccaccgccaagaactgggagctgacagccagcgcctctcaccagcctccaggcgtgtaccctcagggccacagcgataccacagtggccatcagcacctccaccgtgctgctgtgtggactgagcgccgtgtcactgctggcctgctacctgaagtccagacagacccctccactggccagcgtggaaatggaagccatggaagcactgcccgtgacctggggcaccagctccagagatgaggatctggaaaactgctcccaccacctg

SEQ ID NO: 174 - DNA, 2013 bp, Artificial Sequence
  Description of Artificial Sequence: Synthetic polynucleotide
atgtggcagctgttgctgccgacagccctcctgttgctggtctccgctggcatgagaaccgaggatctgcctaaggccgtggtgttcctggaacctcagtggtacagagtgctggaaaaggacagcgtgaccctgaagtgccagggcgcctattctcccgaggacaatagcacccagtggttccacaacgagagcctgatcagcagccaggccagcagctactttatcgatgccgccaccgtggacgacagcggcgagtacagatgccagaccaatctgagcaccctgagcgaccctgtgcagctggaagtgcacattggatggttgctgctgcaagcccctagatgggtgttcaaagaagaggaccccatccacctgagatgccactcttggaagaacacagccctgcacaaagtgacctacctgcagaacggcaagggcagaaagtacttccaccacaacagcgacttctacatccccaaggccacactgaaggactccggctcctacttctgcagaggcctggtcggcagcaagaacgtgtccagcgagacagtgaacatcaccatcacacagggcctcgccgtgtctaccatcagcagctttttcccacctggctatcaggtgtccttctgcctggtcatggtgctgctgttcgccgtggataccggcctgtacttcagcgtcaagaccaacatccggtccagcaccagagactggaaggaccacaagttcaagtggcggaaggaccctcaggacaagggaagcggagccacaaacttctctctgctgaagcaggcaggagatgttgaagaaaaccctggacctatggattggacctggatcctgtttctggtggccgctgccacaagagtgcacagcaattgggtcaacgtgatcagcgacctgaagaagatcgaggacctgatccagagcatgcacatcgacgccacactgtacaccgagtccgatgtgcaccctagctgcaaagtgaccgccatgaagtgctttctgctggaactgcaagtgatcagcctggaaagcggcgacgccagcatccacgataccgtggaaaacctgatcatcctggccaacaacagcctgagcagcaacggcaatgtgaccgagagcggctgcaaagagtgcgaggaactggaagagaagaacatcaaagagttcctccagagcttcgtccacatcgtgcagatgttcatcaacaccagctctggcggaggaagcggaggcggaggatctggtggtggtggatctggcggcggtggtagtggcggaggttctctgcaaatcacctgtcctccacctatgagcgtggaacacgccgacatctgggtcaagagctacagcctgtacagcagagagcggtacatctgcaacagcggcttcaagagaaaggccggcacaagcagcctgaccgagtgtgtgctgaacaaggccacaaacgtggcccactggaccacacctagcctgaagtgcatcagagatcccgctctggttcatcagaggcctgcccctccatctacagtgacaacagctggcgtgacccctcagcctgagtctctgtctccatctggaaaagagcctgccgccagctctcccagctctaacaatactgctgccaccacagccgctatcgtgcctggatctcagctgatgcctagcaagagccctagcaccggcacaacagagatcagctctcacgagagcagccacggaacaccttctcagaccaccgccaagaattgggagctgacagcctctgcctctcatcagccacctggcgtgtacccacagggccactctgatacaacagtggccatcagcaccagcaccgttctgctgtgtggcctgtctgctgttagcctgctggcctgctacctgaagtctagacagacacctcctctggccagcgtggaaatggaagccatggaagctctgcctgtcacatggggcaccagcagcagagatgaggacctcgagaattgcagccaccacctg

SEQ ID NO: 175 - DNA, 1470 bp, Artificial Sequence
  Description of Artificial Sequence: Synthetic polynucleotide
atgcttctcctggtgacaagccttctgctctgtgagttaccacacccagcattcctcctgatcccagacatccagatgacacagactacatcctccctgtctgcctctctgggagacagagtcaccatcagttgcagggcaagtcaggacattagtaaatatttaaattggtatcagcagaaaccagatggaactgttaaactcctgatctaccatacatcaagattacactcaggagtcccatcaaggttcagtggcagtgggtctggaacagattattctctcaccattagcaacctggagcaagaagatattgccacttacttttgccaacagggtaatacgcttccgtacacgttcggaggggggactaagttggaaataacaggctccacctctggatccggcaagcccggatctggcgagggatccaccaagggcgaggtgaaactgcaggagtcaggacctggcctggtggcgccctcacagagcctgtccgtcacatgcactgtctcaggggtctcattacccgactatggtgtaagctggattcgccagcctccacgaaagggtctggagtggctgggagtaatatggggtagtgaaaccacatactataattcagctctcaaatccagactgaccatcatcaaggacaactccaagagccaagttttcttaaaaatgaacagtctgcaaactgatgacacagccatttactactgtgccaaacattattactacggtggtagctatgctatggactactggggtcaaggaacctcagtcaccgtctcctcagcggccgcaattgaagttatgtatcctcctccttacctagacaatgagaagagcaatggaaccattatccatgtgaaagggaaacacctttgtccaagtcccctatttcccggaccttctaagcccttttgggtgctggtggtggttgggggagtcctggcttgctatagcttgctagtaacagtggcctttattattttctgggtgaggagtaagaggagcaggctcctgcacagtgactacatgaacatgactccccgccgccccgggcccacccgcaagcattaccagccctatgccccaccacgcgacttcgcagcctatcgctccagagtgaagttcagcaggagcgcagacgcccccgcgtaccagcagggccagaaccagctctataacgagctcaatctaggacgaagagaggagtacgatgttttggacaagagacgtggccgggaccctgagatggggggaaagccgagaaggaagaaccctcaggaaggcctgtacaatgaactgcagaaagataagatggcggaggcctacagtgagattgggatgaaaggcgagcgccggaggggcaaggggcacgatggcctttaccagggtctcagtacagccaccaaggacacctacgacgcccttcacatgcaggccctgccccctcgctaa

SEQ ID NO: 176 - DNA, 1485 bp, Artificial Sequence
  Description of Artificial Sequence: Synthetic polynucleotide
atggcactccccgtcaccgcccttctcttgcccctcgccctgctgctgcatgctgccaggcccatggacgaagtgcagctcgtggagtccggtggaggactcgtccaaccgggcggatcccttcgcttgtcctgcgccgcatcaggcttcagcttcaccaactatggcgtccactgggtcagacaggcccccggaaagggactggaatgggtgtccgtgatctggagcggcgggaacaccgactacaacacctccgtgaagggccggttcactattagccgcgacaactccaagaacactctgtacctccaaatgaactccctgagggccgaagatactgctgtgtactattgcgcgagagccctgacctactacgactacgagttcgcgtactggggccaggggactctcgtgaccgtgtccagcggtggtggaggttccggaggcggaggttctggtggcgggggatcagaaatcgtgctgactcagtcccctgcgaccttgtccctgagccctggagaacgggccaccctgagctgtagagccagccagagcatcgggacaaatattcactggtaccagcagaaacccggacaagcaccacggctgctgatctactacgcctccgagtcgatttccggaatcccggctcgcttttcggggtctggatcgggaacggacttcactctgaccatctcgtcgctggaacccgaggatttcgccgtgtactactgccaacagaacaacaattggccgaccacgttcggccagggcaccaagctcgagattaagggatcactggaagcggccgcaaccacaacacctgctccaaggccccccacacccgctccaactatagccagccaaccattgagcctcagacctgaagcttgcaggcccgcagcaggaggcgccgtccatacgcgaggcctggacttcgcgtgtgatatttatatttgggcccctttggccggaacatgtggggtgttgcttctctcccttgtgatcactctgtattgtaagcgcgggagaaagaagctcctgtacatcttcaagcagccttttatgcgacctgtgcaaaccactcaggaagaagatgggtgttcatgccgcttccccgaggaggaagaaggagggtgtgaactgagggtgaaattttctagaagcgccgatgctcccgcatatcagcagggtcagaatcagctctacaatgaattgaatctcggcaggcgagaagagtacgatgttctggacaagagacggggcagggatcccgagatggggggaaagccccggagaaaaaatcctcaggaggggttgtacaatgagctgcagaaggacaagatggctgaagcctatagcgagatcggaatgaaaggcgaaagacgcagaggcaaggggcatgacggtctgtaccagggtctctctacagccaccaaggacacttatgatgcgttgcatatgcaagccttgccaccccgctaa

SEQ ID NO: 177 - DNA, 720 bp, Artificial Sequence
  Description of Artificial Sequence: Synthetic polynucleotide
atggtgagcaagggcgaggagctgttcaccggggtggtgcccatcctggtcgagctggacggcgacgtaaacggccacaagttcagcgtgtccggcgagggcgagggcgatgccacctacggcaagctgaccctgaagttcatctgcaccaccggcaagctgcccgtgccctggcccaccctcgtgaccaccctgacctacggcgtgcagtgcttcagccgctaccccgaccacatgaagcagcacgacttcttcaagtccgccatgcccgaaggctacgtccaggagcgcaccatcttcttcaaggacgacggcaactacaagacccgcgccgaggtgaagttcgagggcgacaccctggtgaaccgcatcgagctgaagggcatcgacttcaaggaggacggcaacatcctggggcacaagctggagtacaactacaacagccacaacgtctatatcatggccgacaagcagaagaacggcatcaaggtgaacttcaagatccgccacaacatcgaggacggcagcgtgcagctcgccgaccactaccagcagaacacccccatcggcgacggccccgtgctgctgcccgacaaccactacctgagcacccagtccgccctgagcaaagaccccaacgagaagcgcgatcacatggtcctgctggagttcgtgaccgccgccgggatcactctcggcatggacgagctgtacaagtga

SEQ ID NO: 178 - DNA, 1053 bp, Artificial Sequence
  Description of Artificial Sequence: Synthetic polynucleotide
atgtcaaatattacagatccacagatgtgggattttgatgatctaaatttcactggcatgccacctgcagatgaagattacagcccctgtatgctagaaactgagacactcaacaagtatgttgtgatcatcgcctatgccctagtgttcctgctgagcctgctgggaaactccctggtgatgctggtcatcttatacagcagggtcggccgctccgtcactgatgtctacctgctgaacctggccttggccgacctactctttgccctgaccttgcccatctgggccgcctccaaggtgaatggctggatttttggcacattcctgtgcaaggtggtctcactcctgaaggaagtcaacttctacagtggcatcctgctgttggcctgcatcagtgtggaccgttacctggccattgtccatgccacacgcacactgacccagaagcgtcacttggtcaagtttgtttgtcttggctgctggggactgtctatgaatctgtccctgcccttcttccttttccgccaggcttaccatccaaacaattccagtccagtttgctatgaggtcctgggaaatgacacagcaaaatggcggatggtgttgcggatcctgcctcacacctttggcttcatcgtgccgctgtttgtcatgctgttctgctatggattcaccctgcgtacactgtttaaggcccacatggggcagaagcaccgagccatgagggtcatctttgctgtcgtcctcatcttcctgctttgctggctgccctacaacctggtcctgctggcagacaccctcatgaggacccaggtgatccaggagagctgtgagcgccgcaacaacatcggccgggccctggatgccactgagattctgggatttctccatagctgcctcaaccccatcatctacgccttcatcggccaaaattttcgccatggattcctcaagatcctggctatgcatggcctggtcagcaaggagttcttggcacgtcatcgtgttacctcctacacttcttcgtctgtcaatgtctcttccaacctctga

SEQ ID NO: 179 - DNA, 1248 bp, Artificial Sequence
  Description of Artificial Sequence: Synthetic polynucleotide
atggagttgaggaagtacggccctggaagactggcggggacagttataggaggagctgctcagagtaaatcacagactaaatcagactcaatcacaaaagagttcctgccaggcctttacacagccccttcctccccgttcccgccctcacaggtgagtgaccaccaagtgctaaatgacgccgaggttgccgccctcctggagaacttcagctcttcctatgactatggagaaaacgagagtgactcgtgctgtacctccccgccctgcccacaggacttcagcctgaacttcgaccgggccttcctgccagccctctacagcctcctctttctgctggggctgctgggcaacggcgcggtggcagccgtgctgctgagccggcggacagccctgagcagcaccgacaccttcctgctccacctagctgtagcagacacgctgctggtgctgacactgccgctctgggcagtggacgctgccgtccagtgggtctttggctctggcctctgcaaagtggcaggtgccctcttcaacatcaacttctacgcaggagccctcctgctggcctgcatcagctttgaccgctacctgaacatagttcatgccacccagctctaccgccgggggcccccggcccgcgtgaccctcacctgcctggctgtctgggggctctgcctgcttttcgccctcccagacttcatcttcctgtcggcccaccacgacgagcgcctcaacgccacccactgccaatacaacttcccacaggtgggccgcacggctctgcgggtgctgcagctggtggctggctttctgctgcccctgctggtcatggcctactgctatgcccacatcctggccgtgctgctggtttccaggggccagcggcgcctgcgggccatgcggctggtggtggtggtcgtggtggcctttgccctctgctggaccccctatcacctggtggtgctggtggacatcctcatggacctgggcgctttggcccgcaactgtggccgagaaagcagggtagacgtggccaagtcggtcacctcaggcctgggctacatgcactgctgcctcaacccgctgctctatgcctttgtaggggtcaagttccgggagcggatgtggatgctgctcttgcgcctgggctgccccaaccagagagggctccagaggcagccatcgtcttcccgccgggattcatcctggtctgagacctcagaggcctcctactcgggcttgtga

SEQ ID NO: 180 - DNA, 1107 bp, Artificial Sequence
  Description of Artificial Sequence: Synthetic polynucleotide
atggtccttgaggtgagtgaccaccaagtgctaaatgacgccgaggttgccgccctcctggagaacttcagctcttcctatgactatggagaaaacgagagtgactcgtgctgtacctccccgccctgcccacaggacttcagcctgaacttcgaccgggccttcctgccagccctctacagcctcctctttctgctggggctgctgggcaacggcgcggtggcagccgtgctgctgagccggcggacagccctgagcagcaccgacaccttcctgctccacctagctgtagcagacacgctgctggtgctgacactgccgctctgggcagtggacgctgccgtccagtgggtctttggctctggcctctgcaaagtggcaggtgccctcttcaacatcaacttctacgcaggagccctcctgctggcctgcatcagctttgaccgctacctgaacatagttcatgccacccagctctaccgccgggggcccccggcccgcgtgaccctcacctgcctggctgtctgggggctctgcctgcttttcgccctcccagacttcatcttcctgtcggcccaccacgacgagcgcctcaacgccacccactgccaatacaacttcccacaggtgggccgcacggctctgcgggtgctgcagctggtggctggctttctgctgcccctgctggtcatggcctactgctatgcccacatcctggccgtgctgctggtttccaggggccagcggcgcctgcgggccatgcggctggtggtggtggtcgtggtggcctttgccctctgctggaccccctatcacctggtggtgctggtggacatcctcatggacctgggcgctttggcccgcaactgtggccgagaaagcagggtagacgtggccaagtcggtcacctcaggcctgggctacatgcactgctgcctcaacccgctgctctatgcctttgtaggggtcaagttccgggagcggatgtggatgctgctcttgcgcctgggctgccccaaccagagagggctccagaggcagccatcgtcttcccgccgggattcatcctggtctgagacctcagaggcctcctactcgggcttgtga

SEQ ID NO: 181 - DNA, 1059 bp, Artificial Sequence
  Description of Artificial Sequence: Synthetic polynucleotide
atggattatcaagtgtcaagtccaatctatgacatcaattattatacatcggagccctgccaaaaaatcaatgtgaagcaaatcgcagcccgcctcctgcctccgctctactcactggtgttcatctttggttttgtgggcaacatgctggtcatcctcatcctgataaactgcaaaaggctgaagagcatgactgacatctacctgctcaacctggccatctctgacctgtttttccttcttactgtccccttctgggctcactatgctgccgcccagtgggactttggaaatacaatgtgtcaactcttgacagggctctattttataggcttcttctctggaatcttcttcatcatcctcctgacaatcgataggtacctggctgtcgtccatgctgtgtttgctttaaaagccaggacggtcacctttggggtggtgacaagtgtgatcacttgggtggtggctgtgtttgcgtctctcccaggaatcatctttaccagatctcaaaaagaaggtcttcattacacctgcagctctcattttccatacagtcagtatcaattctggaagaatttccagacattaaagatagtcatcttggggctggtcctgccgctgcttgtcatggtcatctgctactcgggaatcctaaaaactctgcttcggtgtcgaaatgagaagaagaggcacagggctgtgaggcttatcttcaccatcatgattgtttattttctcttctgggctccctacaacattgtccttctcctgaacaccttccaggaattctttggcctgaataattgcagtagctctaacaggttggaccaagctatgcaggtgacagagactcttgggatgacgcactgctgcatcaaccccatcatctatgcctttgtcggggagaagttcagaaactacctcttagtcttcttccaaaagcacattgccaaacgcttctgcaaatgctgttctattttccagcaagaggctcccgagcgagcaagctcagtttacacccgatccactggggagcaggaaatatctgtgggcttgtga

SEQ ID NO: 182 - DNA, 1125 bp, Artificial Sequence
  Description of Artificial Sequence: Synthetic polynucleotide
atgctgtccacatctcgttctcggtttatcagaaataccaacgagagcggtgaagaagtcaccaccttttttgattatgattacggtgctccctgtcataaatttgacgtgaagcaaattggggcccaactcctgcctccgctctactcgctggtgttcatctttggttttgtgggcaacatgctggtcgtcctcatcttaataaactgcaaaaagctgaagtgcttgactgacatttacctgctcaacctggccatctctgatctgctttttcttattactctcccattgtgggctcactctgctgcaaatgagtgggtctttgggaatgcaatgtgcaaattattcacagggctgtatcacatcggttattttggcggaatcttcttcatcatcctcctgacaatcgatagatacctggctattgtccatgctgtgtttgctttaaaagccaggacggtcacctttggggtggtgacaagtgtgatcacctggttggtggctgtgtttgcttctgtcccaggaatcatctttactaaatgccagaaagaagattctgtttatgtctgtggcccttattttccacgaggatggaataatttccacacaataatgaggaacattttggggctggtcctgccgctgctcatcatggtcatctgctactcgggaatcctgaaaaccctgcttcggtgtcgaaacgagaagaagaggcatagggcagtgagagtcatcttcaccatcatgattgtttactttctcttctggactccctataatattgtcattctcctgaacaccttccaggaattcttcggcctgagtaactgtgaaagcaccagtcaactggaccaagccacgcaggtgacagagactcttgggatgactcactgctgcatcaatcccatcatctatgccttcgttggggagaagttcagaagcctttttcacatagctcttggctgtaggattgccccactccaaaaaccagtgtgtggaggtccaggagtgagaccaggaaagaatgtgaaagtgactacacaaggactcctcgatggtcgtggaaaaggaaagtcaattggcagagcccctgaagccagtcttcaggacaaagaaggagcctag

SEQ ID NO: 183 - protein, 26 aa, Artificial Sequence
  Description of Artificial Sequence: Synthetic peptide
SGGGSGGGGSGGGGSGGGGSGGGSLQ

SEQ ID NO: 184 - protein, 254 aa, Artificial Sequence
  Description of Artificial Sequence: Synthetic polypeptide
MWQLLLPTALLLLVSAGMRTEDLPKAVVFLEPQWYRVLEKDSVTLKCQGAYSPEDNSTQWFHNESLISSQASSYFIDAATVDDSGEYRCQTNLSTLSDPVQLEVHIGWLLLQAPRWVFKEEDPIHLRCHSWKNTALHKVTYLQNGKGRKYFHHNSDFYIPKATLKDSGSYFCRGLVGSKNVSSETVNITITQGLAVSTISSFFPPGYQVSFCLVMVLLFAVDTGLYFSVKTNIRSSTRDWKDHKFKWRKDPQDK

SEQ ID NO: 185 - protein, 323 aa, Artificial Sequence
  Description of Artificial Sequence: Synthetic polypeptide
MWPLVAALLLGSACCGSAQLLFNKTKSVEFTFCNDTVVIPCFVTNMEAQNTTEVYVKWKFKGRDIYTFDGALNKSTVPTDFSSAKIEVSQLLKGDASLKMDKSDAVSHTGNYTCEVTELTREGETIIELKYRVVSWFSPNENILIVIFPIFAILLFWGQFGIKTLKYRSGGMDEKTIALLVAGLVITVIVIVGAILFVPGEYSLKNATGLGLIVTSTGILILLHYYVFSTAIGLTSFVIAILVIQVIAYILAVVGLSLCIAACIPMHGPLLISGLSILALAQLLGLVYMKFVASNQKTIQPPRKAVEEPLNAFKESKGMMNDE

SEQ ID NO: 186 - protein, 114 aa, Artificial Sequence
  Description of Artificial Sequence: Synthetic polypeptide
NWVNVISDLKKIEDLIQSMHIDATLYTESDVHPSCKVTAMKCFLLELQVISLESGDASIHDTVENLIILANNSLSSNGNVTESGCKECEELEEKNIKEFLQSFVHIVQMFINTS

SEQ ID NO: 187 - protein, 132 aa, Artificial Sequence
  Description of Artificial Sequence: Synthetic polypeptide
MDWTWILFLVAAATRVHSNWVNVISDLKKIEDLIQSMHIDATLYTESDVHPSCKVTAMKCFLLELQVISLESGDASIHDTVENLIILANNSLSSNGNVTESGCKECEELEEKNIKEFLQSFVHIVQMFINTS

SEQ ID NO: 188 - protein, 151 aa, Artificial Sequence
  Description of Artificial Sequence: Synthetic polypeptide
MDWTWILFLVAAATRVHSGIHVFILGCFSAGLPKTEANWVNVISDLKKIEDLIQSMHIDATLYTESDVHPSCKVTAMKCFLLELQVISLESGDASIHDTVENLIILANNSLSSNGNVTESGCKECEELEEKNIKEFLQSFVHIVQMFINTS

SEQ ID NO: 189 - protein, 237 aa, Artificial Sequence
  Description of Artificial Sequence: Synthetic polypeptide
ITCPPPMSVEHADIWVKSYSLYSRERYICNSGFKRKAGTSSLTECVLNKATNVAHWTTPSLKCIRDPALVHQRPAPPSTVTTAGVTPQPESLSPSGKEPAASSPSSNNTAATTAAIVPGSQLMPSKSPSTGTTEISSHESSHGTPSQTTAKNWELTASASHQPPGVYPQGHSDTTVAISTSTVLLCGLSAVSLLACYLKSRQTPPLASVEMEAMEALPVTWGTSSRDEDLENCSHHL

SEQ ID NO: 190 - protein, 395 aa, Artificial Sequence [sequence omitted]

SEQ ID NO: 191 - protein, 414 aa, Artificial Sequence
  Description of Artificial Sequence: Synthetic polypeptide
MDWTWILFLVAAATRVHSGIHVFILGCFSAGLPKTEANWVNVISDLKKIEDLIQSMHIDATLYTESDVHPSCKVTAMKCFLLELQVISLESGDASIHDTVENLIILANNSLSSNGNVTESGCKECEELEEKNIKEFLQSFVHIVQMFINTSSGGGSGGGGSGGGGSGGGGSGGGSLQITCPPPMSVEHADIWVKSYSLYSRERYICNSGFKRKAGTSSLTECVLNKATNVAHWTTPSLKCIRDPALVHQRPAPPSTVTTAGVTPQPESLSPSGKEPAASSPSSNNTAATTAAIVPGSQLMPSKSPSTGTTEISSHESSHGTPSQTTAKNWELTASASHQPPGVYPQGHSDTTVAISTSTVLLCGLSAVSLLACYLKSRQTPPLASVEMEAMEALPVTWGTSSRDEDLENCSHHL

SEQ ID NO: 192 - protein, 671 aa, Artificial Sequence
  Description of Artificial Sequence: Synthetic polypeptide
MWQLLLPTALLLLVSAGMRTEDLPKAVVFLEPQWYRVLEKDSVTLKCQGAYSPEDNSTQWFHNESLISSQASSYFIDAATVDDSGEYRCQTNLSTLSDPVQLEVHIGWLLLQAPRWVFKEEDPIHLRCHSWKNTALHKVTYLQNGKGRKYFHHNSDFYIPKATLKDSGSYFCRGLVGSKNVSSETVNITITQGLAVSTISSFFPPGYQVSFCLVMVLLFAVDTGLYFSVKTNIRSSTRDWKDHKFKWRKDPQDKGSGATNFSLLKQAGDVEENPGPMDWTWILFLVAAATRVHSNWVNVISDLKKIEDLIQSMHIDATLYTESDVHPSCKVTAMKCFLLELQVISLESGDASIHDTVENLIILANNSLSSNGNVTESGCKECEELEEKNIKEFLQSFVHIVQMFINTSSGGGSGGGGSGGGGSGGGGSGGGSLQITCPPPMSVEHADIWVKSYSLYSRERYICNSGFKRKAGTSSLTECVLNKATNVAHWTTPSLKCIRDPALVHQRPAPPSTVTTAGVTPQPESLSPSGKEPAASSPSSNNTAATTAAIVPGSQLMPSKSPSTGTTEISSHESSHGTPSQTTAKNWELTASASHQPPGVYPQGHSDTTVAISTSTVLLCGLSAVSLLACYLKSRQTPPLASVEMEAMEALPVTWGTSSRDEDLENCSHHL

SEQ ID NO: 193 - protein, 489 aa, Artificial Sequence
  Description of Artificial Sequence: Synthetic polypeptide
MLLLVTSLLLCELPHPAFLLIPDIQMTQTTSSLSASLGDRVTISCRASQDISKYLNWYQQKPDGTVKLLIYHTSRLHSGVPSRFSGSGSGTDYSLTISNLEQEDIATYFCQQGNTLPYTFGGGTKLEITGSTSGSGKPGSGEGSTKGEVKLQESGPGLVAPSQSLSVTCTVSGVSLPDYGVSWIRQPPRKGLEWLGVIWGSETTYYNSALKSRLTIIKDNSKSQVFLKMNSLQTDDTAIYYCAKHYYYGGSYAMDYWGQGTSVTVSSAAAIEVMYPPPYLDNEKSNGTIIHVKGKHLCPSPLFPGPSKPFWVLVVVGGVLACYSLLVTVAFIIFWVRSKRSRLLHSDYMNMTPRRPGPTRKHYQPYAPPRDFAAYRSRVKFSRSADAPAYQQGQNQLYNELNLGRREEYDVLDKRRGRDPEMGGKPRRKNPQEGLYNELQKDKMAEAYSEIGMKGERRRGKGHDGLYQGLSTATKDTYDALHMQALPPR

SEQ ID NO: 194 - protein, 494 aa, Artificial Sequence
  Description of Artificial Sequence: Synthetic polypeptide
MALPVTALLLPLALLLHAARPMDEVQLVESGGGLVQPGGSLRLSCAASGFSFTNYGVHWVRQAPGKGLEWVSVIWSGGNTDYNTSVKGRFTISRDNSKNTLYLQMNSLRAEDTAVYYCARALTYYDYEFAYWGQGTLVTVSSGGGGSGGGGSGGGGSEIVLTQSPATLSLSPGERATLSCRASQSIGTNIHWYQQKPGQAPRLLIYYASESISGIPARFSGSGSGTDFTLTISSLEPEDFAVYYCQQNNNWPTTFGQGTKLEIKGSLEAAATTTPAPRPPTPAPTIASQPLSLRPEACRPAAGGAVHTRGLDFACDIYIWAPLAGTCGVLLLSLVITLYCKRGRKKLLYIFKQPFMRPVQTTQEEDGCSCRFPEEEEGGCELRVKFSRSADAPAYQQGQNQLYNELNLGRREEYDVLDKRRGRDPEMGGKPRRKNPQEGLYNELQKDKMAEAYSEIGMKGERRRGKGHDGLYQGLSTATKDTYDALHMQALPPR

SEQ ID NO: 195 - protein, 239 aa, Artificial Sequence
  Description of Artificial Sequence: Synthetic polypeptide
MVSKGEELFTGVVPILVELDGDVNGHKFSVSGEGEGDATYGKLTLKFICTTGKLPVPWPTLVTTLTYGVQCFSRYPDHMKQHDFFKSAMPEGYVQERTIFFKDDGNYKTRAEVKFEGDTLVNRIELKGIDFKEDGNILGHKLEYNYNSHNVYIMADKQKNGIKVNFKIRHNIEDGSVQLADHYQQNTPIGDGPVLLPDNHYLSTQSALSKDPNEKRDHMVLLEFVTAAGITLGMDELYK

SEQ ID NO: 196 - protein, 350 aa, Artificial Sequence
  Description of Artificial Sequence: Synthetic polypeptide
MSNITDPQMWDFDDLNFTGMPPADEDYSPCMLETETLNKYVVIIAYALVFLLSLLGNSLVMLVILYSRVGRSVTDVYLLNLALADLLFALTLPIWAASKVNGWIFGTFLCKVVSLLKEVNFYSGILLLACISVDRYLAIVHATRTLTQKRHLVKFVCLGCWGLSMNLSLPFFLFRQAYHPNNSSPVCYEVLGNDTAKWRMVLRILPHTFGFIVPLFVMLFCYGFTLRTLFKAHMGQKHRAMRVIFAVVLIFLLCWLPYNLVLLADTLMRTQVIQESCERRNNIGRALDATEILGFLHSCLNPIIYAFIGQNFRHGFLKILAMHGLVSKEFLARHRVTSYTSSSVNVSSNL

SEQ ID NO: 197 - protein, 415 aa, Artificial Sequence
  Description of Artificial Sequence: Synthetic polypeptide
MELRKYGPGRLAGTVIGGAAQSKSQTKSDSITKEFLPGLYTAPSSPFPPSQVSDHQVLNDAEVAALLENFSSSYDYGENESDSCCTSPPCPQDFSLNFDRAFLPALYSLLFLLGLLGNGAVAAVLLSRRTALSSTDTFLLHLAVADTLLVLTLPLWAVDAAVQWVFGSGLCKVAGALFNINFYAGALLLACISFDRYLNIVHATQLYRRGPPARVTLTCLAVWGLCLLFALPDFIFLSAHHDERLNATHCQYNFPQVGRTALRVLQLVAGFLLPLLVMAYCYAHILAVLLVSRGQRRLRAMRLVVVVVVAFALCWTPYHLVVLVDILMDLGALARNCGRESRVDVAKSVTSGLGYMHCCLNPLLYAFVGVKFRERMWMLLLRLGCPNQRGLQRQPSSSRRDSSWSETSEASYSGL

SEQ ID NO: 198 - protein, 368 aa, Artificial Sequence
  Description of Artificial Sequence: Synthetic polypeptide
MVLEVSDHQVLNDAEVAALLENFSSSYDYGENESDSCCTSPPCPQDFSLNFDRAFLPALYSLLFLLGLLGNGAVAAVLLSRRTALSSTDTFLLHLAVADTLLVLTLPLWAVDAAVQWVFGSGLCKVAGALFNINFYAGALLLACISFDRYLNIVHATQLYRRGPPARVTLTCLAVWGLCLLFALPDFIFLSAHHDERLNATHCQYNFPQVGRTALRVLQLVAGFLLPLLVMAYCYAHILAVLLVSRGQRRLRAMRLVVVVVVAFALCWTPYHLVVLVDILMDLGALARNCGRESRVDVAKSVTSGLGYMHCCLNPLLYAFVGVKFRERMWMLLLRLGCPNQRGLQRQPSSSRRDSSWSETSEASYSGL

SEQ ID NO: 199 - protein, 352 aa, Artificial Sequence [sequence omitted]

SEQ ID NO: 200 - protein, 374 aa, Artificial Sequence
  Description of Artificial Sequence: Synthetic polypeptide
MLSTSRSRFIRNTNESGEEVTTFFDYDYGAPCHKFDVKQIGAQLLPPLYSLVFIFGFVGNMLVVLILINCKKLKCLTDIYLLNLAISDLLFLITLPLWAHSAANEWVFGNAMCKLFTGLYHIGYFGGIFFIILLTIDRYLAIVHAVFALKARTVTFGVVTSVITWLVAVFASVPGIIFTKCQKEDSVYVCGPYFPRGWNNFHTIMRNILGLVLPLLIMVICYSGILKTLLRCRNEKKRHRAVRVIFTIMIVYFLFWTPYNIVILLNTFQEFFGLSNCESTSQLDQATQVTETLGMTHCCINPIIYAFVGEKFRSLFHIALGCRIAPLQKPVCGGPGVRPGKNVKVTTQGLLDGRGKGKSIGRAPEASLQDKEGA

SEQ ID NO: 201 - DNA, 2456 bp, Artificial Sequence
  Description of Artificial Sequence: Synthetic polynucleotide
cctgcaggcagctgcgcgctcgctcgctcactgaggccgcccgggcaaagcccgggcgtcgggcgacctttggtcgcccggcctcagtgagcgagcgagcgcgcagagagggagtggccaactccatcactaggggttcctgtcgacgaagactgtggatggcccctccgggaaactgtggcgtgatggccgcggggctctccagaacatcatccctgcctctactggcgctgccaaggctgtgggcaaggtcatccctgagctgaacgggaagctcactggcatggccttccgtgtccccactgccaacgtgtcagtggtggacctgacctgccgtctagaaaaacctgccaaatatgatgacatcaagaaggtggtgaagcaggcgtcggagggccccctcaagggcatcctgggctacactgagcaccaggtggtctcctctgacttcaacagcgacacccactcctccacctttgacgctggggctggcattgccctcaacgaccactttgtcaagctcatttcctggtatgtggctggggccagagactggctcttaaaaagtgcagggtctggcgccctctggtggctggctcagaaaaagggccctgacaactctttacatcttctaggtatgacaacgagttcggatatagcaatagagtggtcgatctgatggctcatatggctagcaaagagggaagcggagctactaacttcagcctgctgaagcaggctggagacgtggaggagaaccctggacctatgtggcaactgctgctgcctacagctctgctgcttctggtgtctgccggcatgagaaccgaggatctgcctaaggccgtggtgttcctggaacctcagtggtacagagtgctggaaaaggacagcgtgaccctgaagtgccagggcgcctattctcccgaggacaatagcacccagtggttccacaacgagagcctgatcagcagccaggccagcagctactttatcgatgccgccaccgtggacgacagcggcgagtacagatgccagaccaatctgagcaccctgagcgaccctgtgcagctggaagtgcacattggatggttgctgctgcaagcccctagatgggtgttcaaagaagaggaccccatccacctgagatgccactcttggaagaacacagccctgcacaaagtgacctacctgcagaacggcaagggcagaaagtacttccaccacaacagcgacttctacatccccaaggccacactgaaggactccggctcctacttctgcagaggcctggtcggcagcaagaacgtgtccagcgagacagtgaacatcaccatcacacagggcctcgccgtgtctaccatcagcagctttttcccacctggctatcaggtgtccttctgcctggtcatggtgctgctgttcgccgtggataccggcctgtacttcagcgtcaagaccaacatccggtccagcaccagagactggaaggaccacaagttcaagtggcggaaggaccctcaggacaagtaagcggccgcgtcgagtctagagggcccgtttaaacccgctgatcagcctcgactgtgccttctagttgccagccatctgttgtttgcccctcccccgtgccttccttgaccctggaaggtgccactcccactgtcctttcctaataaaatgaggaaattgcatcgcattgtctgagtaggtgtcattctattctggggggtggggtggggcaggacagcaagggggaggattgggaagacaatagcaggcatgctggggatgcggtgggctctatggatttggctacagcaacagggtggtggacctcatggcccacatggcctccaaggagtaagacccctggaccaccagccccagcaagagcacaagaggaagagagagaccctcactgctggggagtccctgccacactcagtcccccaccacactgaatctcccctcctcacagttgccatgtagaccccttgaagaggggaggggcctagggagccgcaccttgtcatgtaccatcaataaagtaccctgtgctcaaccagttacttgtcctgtcttattctagggtctggggcagaggggagggaagctgggcttgtgtcaaggtgagacattcttgctggggagggacctggtatgttctcctcagactgagggtagggcctccaaacagccttgcttgcttcgagaaccatttgcttcccgctcagacgtcttgagtgctacaggaagctggcaccactacttcagagaacaaggccttttcctctcctcgctccagtagatctaggaacccctagtgatggagttggccactccctctctgcgcgctcgctcgctcactgaggccgggcgaccaaaggtcgcccgacgcccgggctttgcccgggcggcctcagtgagcgagcgagcgcgcagctgcctgcagg

SEQ ID NO: 202 - DNA, 2411 bp, Artificial Sequence
  Description of Artificial Sequence: Synthetic polynucleotide
cctgcaggcagctgcgcgctcgctcgctcactgaggccgcccgggcaaagcccgggcgtcgggcgacctttggtcgcccggcctcagtgagcgagcgagcgcgcagagagggagtggccaactccatcactaggggttcctgtcgacgaagactgtggatggcccctccgggaaactgtggcgtgatggccgcggggctctccagaacatcatccctgcctctactggcgctgccaaggctgtgggcaaggtcatccctgagctgaacgggaagctcactggcatggccttccgtgtccccactgccaacgtgtcagtggtggacctgacctgccgtctagaaaaacctgccaaatatgatgacatcaagaaggtggtgaagcaggcgtcggagggccccctcaagggcatcctgggctacactgagcaccaggtggtctcctctgacttcaacagcgacacccactcctccacctttgacgctggggctggcattgccctcaacgaccactttgtcaagctcatttcctggtatgtggctggggccagagactggctcttaaaaagtgcagggtctggcgccctctggtggctggctcagaaaaagggccctgacaactctttacatcttctaggtatgacaacgagttcggatatagcaatagagtggtcgatctgatggctcatatggctagcaaagagggaagcggagctactaacttcagcctgctgaagcaggctggagacgtggaggagaaccctggacctatggtgagcaagggcgaggagctgttcaccggggtggtgcccatcctggtcgagctggacggcgacgtaaacggccacaagttcagcgtgtccggcgagggcgagggcgatgccacctacggcaagctgaccctgaagttcatctgcaccaccggcaagctgcccgtgccctggcccaccctcgtgaccaccctgacctacggcgtgcagtgcttcagccgctaccccgaccacatgaagcagcacgacttcttcaagtccgccatgcccgaaggctacgtccaggagcgcaccatcttcttcaaggacgacggcaactacaagacccgcgccgaggtgaagttcgagggcgacaccctggtgaaccgcatcgagctgaagggcatcgacttcaaggaggacggcaacatcctggggcacaagctggagtacaactacaacagccacaacgtctatatcatggccgacaagcagaagaacggcatcaaggtgaacttcaagatccgccacaacatcgaggacggcagcgtgcagctcgccgaccactaccagcagaacacccccatcggcgacggccccgtgctgctgcccgacaaccactacctgagcacccagtccgccctgagcaaagaccccaacgagaagcgcgatcacatggtcctgctggagttcgtgaccgccgccgggatcactctcggcatggacgagctgtacaagtgagcggccgcgtcgagtctagagggcccgtttaaacccgctgatcagcctcgactgtgccttctagttgccagccatctgttgtttgcccctcccccgtgccttccttgaccctggaaggtgccactcccactgtcctttcctaataaaatgaggaaattgcatcgcattgtctgagtaggtgtcattctattctggggggtggggtggggcaggacagcaagggggaggattgggaagacaatagcaggcatgctggggatgcggtgggctctatggatttggctacagcaacagggtggtggacctcatggcccacatggcctccaaggagtaagacccctggaccaccagccccagcaagagcacaagaggaagagagagaccctcactgctggggagtccctgccacactcagtcccccaccacactgaatctcccctcctcacagttgccatgtagaccccttgaagaggggaggggcctagggagccgcaccttgtcatgtaccatcaataaagtaccctgtgctcaaccagttacttgtcctgtcttattctagggtctggggcagaggggagggaagctgggcttgtgtcaaggtgagacattcttgctggggagggacctggtatgttctcctcagactgagggtagggcctccaaacagccttgcttgcttcgagaaccatttgcttcccgctcagacgtcttgagtgctacaggaagctggcaccactacttcagagaacaaggccttttcctctcctcgctccagtagatctaggaacccctagtgatggagttggccactccctctctgcgcgctcgctcgctcactgaggccgggcgaccaaaggtcgcccgacgcccgggctttgcccgggcggcctcagtgagcgagcgagcgcgcagctgcctgcagg

SEQ ID NO: 203 - DNA, 3162 bp, Artificial Sequence
  Description of Artificial Sequence: Synthetic polynucleotide
cctgcaggcagctgcgcgctcgctcgctcactgaggccgcccgggcaaagcccgggcgtcgggcgacctttggtcgcccggcctcagtgagcgagcgagcgcgcagagagggagtggccaactccatcactaggggttcctgtcgacgaagactgtggatggcccctccgggaaactgtggcgtgatggccgcggggctctccagaacatcatccctgcctctactggcgctgccaaggctgtgggcaaggtcatccctgagctgaacgggaagctcactggcatggccttccgtgtccccactgccaacgtgtcagtggtggacctgacctgccgtctagaaaaacctgccaaatatgatgacatcaagaaggtggtgaagcaggcgtcggagggccccctcaagggcatcctgggctacactgagcaccaggtggtctcctctgacttcaacagcgacacccactcctccacctttgacgctggggctggcattgccctcaacgaccactttgtcaagctcatttcctggtatgtggctggggccagagactggctcttaaaaagtgcagggtctggcgccctctggtggctggctcagaaaaagggccctgacaactctttacatcttctaggtatgacaacgagttcggatatagcaatagagtggtcgatctgatggctcatatggctagcaaagagggaagcggagctactaacttcagcctgctgaagcaggctggagacgtggaggagaaccctggacctatgcttctcctggtgacaagccttctgctctgtgagttaccacacccagcattcctcctgatcccagacatccagatgacacagactacatcctccctgtctgcctctctgggagacagagtcaccatcagttgcagggcaagtcaggacattagtaaatatttaaattggtatcagcagaaaccagatggaactgttaaactcctgatctaccatacatcaagattacactcaggagtcccatcaaggttcagtggcagtgggtctggaacagattattctctcaccattagcaacctggagcaagaagatattgccacttacttttgccaacagggtaatacgcttccgtacacgttcggaggggggactaagttggaaataacaggctccacctctggatccggcaagcccggatctggcgagggatccaccaagggcgaggtgaaactgcaggagtcaggacctggcctggtggcgccctcacagagcctgtccgtcacatgcactgtctcaggggtctcattacccgactatggtgtaagctggattcgccagcctccacgaaagggtctggagtggctgggagtaatatggggtagtgaaaccacatactataattcagctctcaaatccagactgaccatcatcaaggacaactccaagagccaagttttcttaaaaatgaacagtctgcaaactgatgacacagccatttactactgtgccaaacattattactacggtggtagctatgctatggactactggggtcaaggaacctcagtcaccgtctcctcagcggccgcaattgaagttatgtatcctcctccttacctagacaatgagaagagcaatggaaccattatccatgtgaaagggaaacacctttgtccaagtcccctatttcccggaccttctaagcccttttgggtgctggtggtggttgggggagtcctggcttgctatagcttgctagtaacagtggcctttattattttctgggtgaggagtaagaggagcaggctcctgcacagtgactacatgaacatgactccccgccgccccgggcccacccgcaagcattaccagccctatgccccaccacgcgacttcgcagcctatcgctccagagtgaagttcagcaggagcgcagacgcccccgcgtaccagcagggccagaaccagctctataacgagctcaatctaggacgaagagaggagtacgatgttttggacaagagacgtggccgggaccctgagatggggggaaagccgagaaggaagaaccctcaggaaggcctgtacaatgaactgcagaaagataagatggcggaggcctacagtgagattgggatgaaaggcgagcgccggaggggcaaggggcacgatggcctttaccagggtctcagtacagccaccaaggacacctacgacgcccttcacatgcaggccctgccccctcgctaaagcggccgcgtcgagtctagagggcccgtttaaacccgctgatcagcctcgactgtgccttctagttgccagccatctgttgtttgcccctcccccgtgccttccttgaccctggaaggtgccactcccactgtcctttcctaataaaatgaggaaattgcatcgcattgtctgagtaggtgtcattctattctggggggtggggtggggcaggacagcaagggggaggattgggaagacaatagcaggcatgctggggatgcggtgggctctatggatttggctacagcaacagggtggtggacctcatggcccacatggcctccaaggagtaagacccctggaccaccagccccagcaagagcacaagaggaagagagagaccctcactgctggggagtccctgccacactcagtcccccaccacactgaatctcccctcctcacagttgccatgtagaccccttgaagaggggaggggcctagggagccgcaccttgtcatgtaccatcaataaagtaccctgtgctcaaccagttacttgtcctgtcttattctagggtctggggcagaggggagggaagctgggcttgtgtcaaggtgagacattcttgctggggagggacctggtatgttctcctcagactgagggtagggcctccaaacagccttgcttgcttcgagaaccatttgcttcccgctcagacgtcttgagtgctacaggaagctggcaccactacttcagagaacaaggccttttcctctcctcgctccagtagatctaggaacccctagtgatggagttggccactccctctctgcgcgctcgctcgctcactgaggccgggcgaccaaaggtcgcccgacgcccgggctttgcccgggcggcctcagtgagcgagcgagcgcgcagctgcctgcagg

SEQ ID NO: 204 - DNA, 3177 bp, Artificial Sequence
  Description of Artificial Sequence: Synthetic polynucleotide
cctgcaggcagctgcgcgctcgctcgctcactgaggccgcccgggcaaagcccgggcgtcgggcgacctttggtcgcccggcctcagtgagcgagcgagcgcgcagagagggagtggccaactccatcactaggggttcctgtcgacgaagactgtggatggcccctccgggaaactgtggcgtgatggccgcggggctctccagaacatcatccctgcctctactggcgctgccaaggctgtgggcaaggtcatccctgagctgaacgggaagctcactggcatggccttccgtgtccccactgccaacgtgtcagtggtggacctgacctgccgtctagaaaaacctgccaaatatgatgacatcaagaaggtggtgaagcaggcgtcggagggccccctcaagggcatcctgggctacactgagcaccaggtggtctcctctgacttcaacagcgacacccactcctccacctttgacgctggggctggcattgccctcaacgaccactttgtcaagctcatttcctggtatgtggctggggccagagactggctcttaaaaagtgcagggtctggcgccctctggtggctggctcagaaaaagggccctgacaactctttacatcttctaggtatgacaacgagttcggatatagcaatagagtggtcgatctgatggctcatatggctagcaaagagggaagcggagctactaacttcagcctgctgaagcaggctggagacgtggaggagaaccctggacctatggcactccccgtcaccgcccttctcttgcccctcgccctgctgctgcatgctgccaggcccatggacgaagtgcagctcgtggagtccggtggaggactcgtccaaccgggcggatcccttcgcttgtcctgcgccgcatcaggcttcagcttcaccaactatggcgtccactgggtcagacaggcccccggaaagggactggaatgggtgtccgtgatctggagcggcgggaacaccgactacaacacctccgtgaagggccggttcactattagccgcgacaactccaagaacactctgtacctccaaatgaactccctgagggccgaagatactgctgtgtactattgcgcgagagccctgacctactacgactacgagttcgcgtactggggccaggggactctcgtgaccgtgtccagcggtggtggaggttccggaggcggaggttctggtggcgggggatcagaaatcgtgctgactcagtcccctgcgaccttgtccctgagccctggagaacgggccaccctgagctgtagagccagccagagcatcgggacaaatattcactggtaccagcagaaacccggacaagcaccacggctgctgatctactacgcctccgagtcgatttccggaatcccggctcgcttttcggggtctggatcgggaacggacttcactctgaccatctcgtcgctggaacccgaggatttcgccgtgtactactgccaacagaacaacaattggccgaccacgttcggccagggcaccaagctcgagattaagggatcactggaagcggccgcaaccacaacacctgctccaaggccccccacacccgctccaactatagccagccaaccattgagcctcagacctgaagcttgcaggcccgcagcaggaggcgccgtccatacgcgaggcctggacttcgcgtgtgatatttatatttgggcccctttggccggaacatgtggggtgttgcttctctcccttgtgatcactctgtattgtaagcgcgggagaaagaagctcctgtacatcttcaagcagccttttatgcgacctgtgcaaaccactcaggaagaagatgggtgttcatgccgcttccccgaggaggaagaaggagggtgtgaactgagggtgaaattttctagaagcgccgatgctcccgcatatcagcagggtcagaatcagctctacaatgaattgaatctcggcaggcgagaagagtacgatgttctggacaagagacggggcagggatcccgagatggggggaaagccccggagaaaaaatcctcaggaggggttgtacaatgagctgcagaaggacaagatggctgaagcctatagcgagatcggaatgaaaggcgaaagacgcagaggcaaggggcatgacggtctgtaccagggtctctctacagccaccaaggacacttatgatgcgttgcatatgcaagccttgccaccccgctaaagcggccgcgtcgagtctagagggcccgtttaaacccgctgatcagcctcgactgtgccttctagttgccagccatctgttgtttgcccctcccccgtgccttccttgaccctggaaggtgccactcccactgtcctttcctaataaaatgaggaaattgcatcgcattgtctgagtaggtgtcattctattctggggggtggggtggggcaggacagcaagggggaggattgggaagacaatagcaggcatgctggggatgcggtgggctctatggatttggctacagcaacagggtggtggacctcatggcccacatggcctccaaggagtaagacccctggaccaccagccccagcaagagcacaagaggaagagagagaccctcactgctggggagtccctgccacactcagtcccccaccacactgaatctcccctcctcacagttgccatgtagaccccttgaagaggggaggggcctagggagccgcaccttgtcatgtaccatcaataaagtaccctgtgctcaaccagttacttgtcctgtcttattctagggtctggggcagaggggagggaagctgggcttgtgtcaaggtgagacattcttgctggggagggacctggtatgttctcctcagactgagggtagggcctccaaacagccttgcttgcttcgagaaccatttgcttcccgctcagacgtcttgagtgctacaggaagctggcaccactacttcagagaacaaggccttttcctctcctcgctccagtagatctaggaacccctagtgatggagttggccactccctctctgcgcgctcgctcgctcactgaggccgggcgaccaaaggtcgcccgacgcccgggctttgcccgggcggcctcagtgagcgagcgagcgcgcagctgcctgcagg

SEQ ID NO: 205 - DNA, 2162 bp, Artificial Sequence
  Description of Artificial Sequence: Synthetic polynucleotide
gaagactgtggatggcccctccgggaaactgtggcgtgatggccgcggggctctccagaacatcatccctgcctctactggcgctgccaaggctgtgggcaaggtcatccctgagctgaacgggaagctcactggcatggccttccgtgtccccactgccaacgtgtcagtggtggacctgacctgccgtctagaaaaacctgccaaatatgatgacatcaagaaggtggtgaagcaggcgtcggagggccccctcaagggcatcctgggctacactgagcaccaggtggtctcctctgacttcaacagcgacacccactcctccacctttgacgctggggctggcattgccctcaacgaccactttgtcaagctcatttcctggtatgtggctggggccagagactggctcttaaaaagtgcagggtctggcgccctctggtggctggctcagaaaaagggccctgacaactctttacatcttctaggtatgacaacgagttcggatatagcaatagagtggtcgatctgatggctcatatggctagcaaagagggaagcggagctactaacttcagcctgctgaagcaggctggagacgtggaggagaaccctggacctatgtggcaactgctgctgcctacagctctgctgcttctggtgtctgccggcatgagaaccgaggatctgcctaaggccgtggtgttcctggaacctcagtggtacagagtgctggaaaaggacagcgtgaccctgaagtgccagggcgcctattctcccgaggacaatagcacccagtggttccacaacgagagcctgatcagcagccaggccagcagctactttatcgatgccgccaccgtggacgacagcggcgagtacagatgccagaccaatctgagcaccctgagcgaccctgtgcagctggaagtgcacattggatggttgctgctgcaagcccctagatgggtgttcaaagaagaggaccccatccacctgagatgccactcttggaagaacacagccctgcacaaagtgacctacctgcagaacggcaagggcagaaagtacttccaccacaacagcgacttctacatccccaaggccacactgaaggactccggctcctacttctgcagaggcctggtcggcagcaagaacgtgtccagcgagacagtgaacatcaccatcacacagggcctcgccgtgtctaccatcagcagctttttcccacctggctatcaggtgtccttctgcctggtcatggtgctgctgttcgccgtggataccggcctgtacttcagcgtcaagaccaacatccggtccagcaccagagactggaaggaccacaagttcaagtggcggaaggaccctcaggacaagtaagcggccgcgtcgagtctagagggcccgtttaaacccgctgatcagcctcgactgtgccttctagttgccagccatctgttgtttgcccctcccccgtgccttccttgaccctggaaggtgccactcccactgtcctttcctaataaaatgaggaaattgcatcgcattgtctgagtaggtgtcattctattctggggggtggggtggggcaggacagcaagggggaggattgggaagacaatagcaggcatgctggggatgcggtgggctctatggatttggctacagcaacagggtggtggacctcatggcccacatggcctccaaggagtaagacccctggaccaccagccccagcaagagcacaagaggaagagagagaccctcactgctggggagtccctgccacactcagtcccccaccacactgaatctcccctcctcacagttgccatgtagaccccttgaagaggggaggggcctagggagccgcaccttgtcatgtaccatcaataaagtaccctgtgctcaaccagttacttgtcctgtcttattctagggtctggggcagaggggagggaagctgggcttgtgtcaaggtgagacattcttgctggggagggacctggtatgttctcctcagactgagggtagggcctccaaacagccttgcttgcttcgagaaccatttgcttcccgctcagacgtcttgagtgctacaggaagctggcaccactacttcagagaacaaggccttttcctctcctcgctccagt

SEQ ID NO: 206 - DNA, 2874 bp, Artificial Sequence
  Description of Artificial Sequence: Synthetic polynucleotide
gtcgacgaagactgtggatggcccctccgggaaactgtggcgtgatggccgcggggctctccagaacatcatccctgcctctactggcgctgccaaggctgtgggcaaggtcatccctgagctgaacgggaagctcactggcatggccttccgtgtccccactgccaacgtgtcagtggtggacctgacctgccgtctagaaaaacctgccaaatatgatgacatcaagaaggtggtgaagcaggcgtcggagggccccctcaagggcatcctgggctacactgagcaccaggtggtctcctctgacttcaacagcgacacccactcctccacctttgacgctggggctggcattgccctcaacgaccactttgtcaagctcatttcctggtatgtggctggggccagagactggctcttaaaaagtgcagggtctggcgccctctggtggctggctcagaaaaagggccctgacaactctttacatcttctaggtatgacaacgagttcggatatagcaatagagtggtcgatctgatggctcatatggctagcaaagagggaagcggagctactaacttcagcctgctgaagcaggctggagacgtggaggagaaccctggacctatgcttctcctggtgacaagccttctgctctgtgagttaccacacccagcattcctcctgatcccagacatccagatgacacagactacatcctccctgtctgcctctctgggagacagagtcaccatcagttgcagggcaagtcaggacattagtaaatatttaaattggtatcagcagaaaccagatggaactgttaaactcctgatctaccatacatcaagattacactcaggagtcccatcaaggttcagtggcagtgggtctggaacagattattctctcaccattagcaacctggagcaagaagatattgccacttacttttgccaacagggtaatacgcttccgtacacgttcggaggggggactaagttggaaataacaggctccacctctggatccggcaagcccggatctggcgagggatccaccaagggcgaggtgaaactgcaggagtcaggacctggcctggtggcgccctcacagagcctgtccgtcacatgcactgtctcaggggtctcattacccgactatggtgtaagctggattcgccagcctccacgaaagggtctggagtggctgggagtaatatggggtagtgaaaccacatactataattcagctctcaaatccagactgaccatcatcaaggacaactccaagagccaagttttcttaaaaatgaacagtctgcaaactgatgacacagccatttactactgtgccaaacattattactacggtggtagctatgctatggactactggggtcaaggaacctcagtcaccgtctcctcagcggccgcaattgaagttatgtatcctcctccttacctagacaatgagaagagcaatggaaccattatccatgtgaaagggaaacacctttgtccaagtcccctatttcccggaccttctaagcccttttgggtgctggtggtggttgggggagtcctggcttgctatagcttgctagtaacagtggcctttattattttctgggtgaggagtaagaggagcaggctcctgcacagtgactacatgaacatgactccccgccgccccgggcccacccgcaagcattaccagccctatgccccaccacgcgacttcgcagcctatcgctccagagtgaagttcagcaggagcgcagacgcccccgcgtaccagcagggccagaaccagctctataacgagctcaatctaggacgaagagaggagtacgatgttttggacaagagacgtggccgggaccctgagatggggggaaagccgagaaggaagaaccctcaggaaggcctgtacaatgaactgcagaaagataagatggcggaggcctacagtgagattgggatgaaaggcgagcgccggaggggcaaggggcacgatggcctttaccagggtctcagtacagccaccaaggacacctacgacgcccttcacatgcaggccctgccccctcgctaaagcggccgcgtcgagtctagagggcccgtttaaacccgctgatcagcctcgactgtgccttctagttgccagccatctgttgtttgcccctcccccgtgccttccttgaccctggaaggtgccactcccactgtcctttcctaataaaatgaggaaattgcatcgcattgtctgagtaggtgtcattctattctggggggtggggtggggcaggacagcaagggggaggattgggaagacaatagcaggcatgctggggatgcggtgggctctatggatttggctacagcaacagggtggtggacctcatggcccacatggcctccaaggagtaagacccctggaccaccagccccagcaagagcacaagaggaagagagagaccctcactgctggggagtccctgccacactcagtcccccaccacactgaatctcccctcctcacagttgccatgtagaccccttgaagaggggaggggcctagggagccgcaccttgtcatgtaccatcaataaagtaccctgtgctcaaccagttacttgtcctgtcttattctagggtctggggcagaggggagggaagctgggcttgtgtcaaggtgagacattcttgctggggagggacctggtatgttctcctcagactgagggtagggcctccaaacagccttgcttgcttcgagaaccatttgcttcccgctcagacgtcttgagtgctacaggaagctggcaccactacttcagagaacaaggccttttcctctcctcgctccagt

SEQ ID NO: 207 - DNA, 2889 bp, Artificial Sequence
  Description of Artificial Sequence: Synthetic polynucleotide
gtcgacgaagactgtggatggcccctccgggaaactgtggcgtgatggccgcggggctctccagaacatcatccctgcctctactggcgctgccaaggctgtgggcaaggtcatccctgagctgaacgggaagctcactggcatggccttccgtgtccccactgccaacgtgtcagtggtggacctgacctgccgtctagaaaaacctgccaaatatgatgacatcaagaaggtggtgaagcaggcgtcggagggccccctcaagggcatcctgggctacactgagcaccaggtggtctcctctgacttcaacagcgacacccactcctccacctttgacgctggggctggcattgccctcaacgaccactttgtcaagctcatttcctggtatgtggctggggccagagactggctcttaaaaagtgcagggtctggcgccctctggtggctggctcagaaaaagggccctgacaactctttacatcttctaggtatgacaacgagttcggatatagcaatagagtggtcgatctgatggctcatatggctagcaaagagggaagcggagctactaacttcagcctgctgaagcaggctggagacgtggaggagaaccctggacctatggcactccccgtcaccgcccttctcttgcccctcgccctgctgctgcatgctgccaggcccatggacgaagtgcagctcgtggagtccggtggaggactcgtccaaccgggcggatcccttcgcttgtcctgcgccgcatcaggcttcagcttcaccaactatggcgtccactgggtcagacaggcccccggaaagggactggaatgggtgtccgtgatctggagcggcgggaacaccgactacaacacctccgtgaagggccggttcactattagccgcgacaactccaagaacactctgtacctccaaatgaactccctgagggccgaagatactgctgtgtactattgcgcgagagccctgacctactacgactacgagttcgcgtactggggccaggggactctcgtgaccgtgtccagcggtggtggaggttccggaggcggaggttctggtggcgggggatcagaaatcgtgctgactcagtcccctgcgaccttgtccctgagccctggagaacgggccaccctgagctgtagagccagccagagcatcgggacaaatattcactggtaccagcagaaacccggacaagcaccacggctgctgatctactacgcctccgagtcgatttccggaatcccggctcgcttttcggggtctggatcgggaacggacttcactctgaccatctcgtcgctggaacccgaggatttcgccgtgtactactgccaacagaacaacaattggccgaccacgttcggccagggcaccaagctcgagattaagggatcactggaagcggccgcaaccacaacacctgctccaaggccccccacacccgctccaactatagccagccaaccattgagcctcagacctgaagcttgcaggcccgcagcaggaggcgccgtccatacgcgaggcctggacttcgcgtgtgatatttatatttgggcccctttggccggaacatgtggggtgttgcttctctcccttgtgatcactctgtattgtaagcgcgggagaaagaagctcctgtacatcttcaagcagccttttatgcgacctgtgcaaaccactcaggaagaagatgggtgttcatgccgcttccccgaggaggaagaaggagggtgtgaactgagggtgaaattttctagaagcgccgatgctcccgcatatcagcagggtcagaatcagctctacaatgaattgaatctcggcaggcgagaagagtacgatgttctggacaagagacggggcagggatcccgagatggggggaaagccccggagaaaaaatcctcaggaggggttgtacaatgagctgcagaaggacaagatggctgaagcctatagcgagatcggaatgaaaggcgaaagacgcagaggcaaggggcatgacggtctgtaccagggtctctctacagccaccaaggacacttatgatgcgttgcatatgcaagccttgccaccccgctaaagcggccgcgtcgagtctagagggcccgtttaaacccgctgatcagcctcgactgtgccttctagttgccagccatctgttgtttgcccctcccccgtgccttccttgaccctggaaggtgccactcccactgtcctttcctaataaaatgaggaaattgcatcgcattgtctgagtaggtgtcattctattctggggggtggggtggggcaggacagcaagggggaggattgggaagacaatagcaggcatgctggggatgcggtgggctctatggatttggctacagcaacagggtggtggacctcatggcccacatggcctccaaggagtaagacccctggaccaccagccccagcaagagcacaagaggaagagagagaccctcactgctggggagtccctgccacactcagtcccccaccacactgaatctcccctcctcacagttgccatgtagaccccttgaagaggggaggggcctagggagccgcaccttgtcatgtaccatcaataaagtaccctgtgctcaaccagttacttgtcctgtcttattctagggtctggggcagaggggagggaagctgggcttgtgtcaaggtgagacattcttgctggggagggacctggtatgttctcctcagactgagggtagggcctccaaacagccttgcttgcttcgagaaccatttgcttcccgctcagacgtcttgagtgctacaggaagctggcaccactacttcagagaacaaggccttttcctctcctcgctccagt

SEQ ID NO: 208 - DNA, 3356 bp, Artificial Sequence
  Description of Artificial Sequence: Synthetic polynucleotide
gaagactgtggatggcccctccgggaaactgtggcgtgatggccgcggggctctccagaacatcatccctgcctctactggcgctgccaaggctgtgggcaaggtcatccctgagctgaacgggaagctcactggcatggccttccgtgtccccactgccaacgtgtcagtggtggacctgacctgccgtctagaaaaacctgccaaatatgatgacatcaagaaggtggtgaagcaggcgtcggagggccccctcaagggcatcctgggctacactgagcaccaggtggtctcctctgacttcaacagcgacacccactcctccacctttgacgctggggctggcattgccctcaacgaccactttgtcaagctcatttcctggtatgtggctggggccagagactggctcttaaaaagtgcagggtctggcgccctctggtggctggctcagaaaaagggccctgacaactctttacatcttctaggtatgacaacgagttcggatatagcaatagagtggtcgatctgatggctcatatggctagcaaagagggaagcggagctactaacttcagcctgctgaagcaggctggagacgtggaggagaaccctggacctatggattggacctggatcctgtttctggtggccgctgccacaagagtgcacagcaattgggtcaacgtgatcagcgacctgaagaagatcgaggacctgatccagagcatgcacatcgacgccacactgtacaccgagtccgatgtgcaccctagctgcaaagtgaccgccatgaagtgctttctgctggaactgcaagtgatcagcctggaaagcggcgacgccagcatccacgataccgtggaaaacctgatcatcctggccaacaacagcctgagcagcaacggcaatgtgaccgagagcggctgcaaagagtgcgaggaactggaagagaagaacatcaaagagttcctccagagcttcgtccacatcgtgcagatgttcatcaacaccagcggaagcggagccacaaacttctctctgctgaagcaggcaggagatgttgaagaaaaccctggacctatcacctgtcctccacctatgagcgtggaacacgccgacatctgggtcaagagctacagcctgtacagcagagagcggtacatctgcaacagcggcttcaagagaaaggccggcacaagcagcctgaccgagtgtgtgctgaacaaggccacaaacgtggcccactggaccacacctagcctgaagtgcatcagagatcccgctctggttcatcagaggcctgcccctccatctacagtgacaacagctggcgtgacccctcagcctgagtctctgtctccatctggaaaagagcctgccgccagctctcccagctctaacaatactgctgccaccacagccgctatcgtgcctggatctcagctgatgcctagcaagagccctagcaccggcacaacagagatcagctctcacgagagcagccacggaacaccttctcagaccaccgccaagaattgggagctgacagcctctgcctctcatcagccacctggcgtgtacccacagggccactctgatacaacagtggccatcagcaccagcaccgttctgctgtgtggcctgtctgctgttagcctgctggcctgctacctgaagtctagacagacacctcctctggccagcgtggaaatggaagccatggaagctctgcctgtcacatggggcaccagcagcagagatgaggacctcgagaattgcagccaccacctgggaagcggagccacaaacttctctctgctgaagcaggcaggagatgttgaagaaaaccctggacctatggtgagcaagggcgaggagctgttcaccggggtggtgcccatcctggtcgagctggacggcgacgtaaacggccacaagttcagcgtgtccggcgagggcgagggcgatgccacctacggcaagctgaccctgaagttcatctgcaccaccggcaagctgcccgtgccctggcccaccctcgtgaccaccctgacctacggcgtgcagtgcttcagccgctaccccgaccacatgaagcagcacgacttcttcaagtccgccatgcccgaaggctacgtccaggagcgcaccatcttcttcaaggacgacggcaactacaagacccgcgccgaggtgaagttcgagggcgacaccctggtgaaccgcatcgagctgaagggcatcgacttcaaggaggacggcaacatcctggggcacaagctggagtacaactacaacagccacaacgtctatatcatggccgacaagcagaagaacggcatcaaggtgaacttcaagatccgccacaacatcgaggacggcagcgtgcagctcgccgaccactaccagcagaacacccccatcggcgacggccccgtgctgctgcccgacaaccactacctgagcacccagtccgccctgagcaaagaccccaacgagaagcgcgatcacatggtcctgctggagttcgtgaccgccgccgggatcactctcggcatggacgagctgtacaagtaagcggccgcgtcgagtctagagggcccgtttaaacccgctgatcagcctcgactgtgccttctagttgccagccatctgttgtttgcccctcccccgtgccttccttgaccctggaaggtgccactcccactgtcctttcctaataaaatgaggaaattgcatcgcattgtctgagtaggtgtcattctattctggggggtggggtggggcaggacagcaagggggaggattgggaagacaatagcaggcatgctggggatgcggtgggctctatggatttggctacagcaacagggtggtggacctcatggcccacatggcctccaaggagtaagacccctggaccaccagccccagcaagagcacaagaggaagagagagaccctcactgctggggagtccctgccacactcagtcccccaccacactgaatctcccctcctcacagttgccatgtagaccccttgaagaggggaggggcctagggagccgcaccttgtcatgtaccatcaataaagtaccctgtgctcaaccagttacttgtcctgtcttattctagggtctggggcagaggggagggaagctgggcttgtgtcaaggtgagacattcttgctggggagggacctggtatgttctcctcagactgagggtagggcctccaaacagccttgcttgcttcgagaaccatttgcttcccgctcagacgtcttgagtgctacaggaagctggcaccactacttcagagaacaaggccttttcctctcctcgctccagt

SEQ ID NO: 209 - DNA, 3401 bp, Artificial Sequence
  Description of Artificial Sequence: Synthetic polynucleotide
gaagactgtggatggcccctccgggaaactgtggcgtgatggccgcggggctctccagaacatcatccctgcctctactggcgctgccaaggctgtgggcaaggtcatccctgagctgaacgggaagctcactggcatggccttccgtgtccccactgccaacgtgtcagtggtggacctgacctgccgtctagaaaaacctgccaaatatgatgacatcaagaaggtggtgaagcaggcgtcggagggccccctcaagggcatcctgggctacactgagcaccaggtggtctcctctgacttcaacagcgacacccactcctccacctttgacgctggggctggcattgccctcaacgaccactttgtcaagctcatttcctggtatgtggctggggccagagactggctcttaaaaagtgcagggtctggcgccctctggtggctggctcagaaaaagggccctgacaactctttacatcttctaggtatgacaacgagttcggatatagcaatagagtggtcgatctgatggctcatatggctagcaaagagggaagcggagctactaacttcagcctgctgaagcaggctggagacgtggaggagaaccctggacctatgtggcagctgttgctgccgacagccctcctgttgctggtctccgctggcatgagaaccgaggatctgcctaaggccgtggtgttcctggaacctcagtggtacagagtgctggaaaaggacagcgtgaccctgaagtgccagggcgcctattctcccgaggacaatagcacccagtggttccacaacgagagcctgatcagcagccaggccagcagctactttatcgatgccgccaccgtggacgacagcggcgagtacagatgccagaccaatctgagcaccctgagcgaccctgtgcagctggaagtgcacattggatggttgctgctgcaagcccctagatgggtgttcaaagaagaggaccccatccacctgagatgccactcttggaagaacacagccctgcacaaagtgacctacctgcagaacggcaagggcagaaagtacttccaccacaacagcgacttctacatccccaaggccacactgaaggactccggctcctacttctgcagaggcctggtcggcagcaagaacgtgtccagcgagacagtgaacatcaccatcacacagggcctcgccgtgtctaccatcagcagctttttcccacctggctatcaggtgtccttctgcctggtcatggtgctgctgttcgccgtggataccggcctgtacttcagcgtcaagaccaacatccggtccagcaccagagactggaaggaccacaagttcaagtggcggaaggaccctcaggacaagggaagcggagccacaaacttctctctgctgaagcaggcaggagatgttgaagaaaaccctggacctatggattggacctggatcctgtttctggtggccgctgccacaagagtgcacagcaattgggtcaacgtgatcagcgacctgaagaagatcgaggacctgatccagagcatgcacatcgacgccacactgtacaccgagtccgatgtgcaccctagctgcaaagtgaccgccatgaagtgctttctgctggaactgcaagtgatcagcctggaaagcggcgacgccagcatccacgataccgtggaaaacctgatcatcctggccaacaacagcctgagcagcaacggcaatgtgaccgagagcggctgcaaagagtgcgaggaactggaagagaagaacatcaaagagttcctccagagcttcgtccacatcgtgcagatgttcatcaacaccagcggaagcggagccacaaacttctctctgctgaagcaggcaggagatgttgaagaaaaccctggacctatcacctgtcctccacctatgagcgtggaacacgccgacatctgggtcaagagctacagcctgtacagcagagagcggtacatctgcaacagcggcttcaagagaaaggccggcacaagcagcctgaccgagtgtgtgctgaacaaggccacaaacgtggcccactggaccacacctagcctgaagtgcatcagagatcccgctctggttcatcagaggcctgcccctccatctacagtgacaacagctggcgtgacccctcagcctgagtctctgtctccatctggaaaagagcctgccgccagctctcccagctctaacaatactgctgccaccacagccgctatcgtgcctggatctcagctgatgcctagcaagagccctagcaccggcacaacagagatcagctctcacgagagcagccacggaacaccttctcagaccaccgccaagaattgggagctgacagcctctgcctctcatcagccacctggcgtgtacccacagggccactctgatacaacagtggccatcagcaccagcaccgttctgctgtgtggcctgtctgctgttagcctgctggcctgctacctgaagtctagacagacacctcctctggccagcgtggaaatggaagccatggaagctctgcctgtcacatggggcaccagcagcagagatgaggacctcgagaattgcagccaccacctgtaagcggccgcgtcgagtctagagggcccgtttaaacccgctgatcagcctcgactgtgccttctagttgccagccatctgttgtttgcccctcccccgtgccttccttgaccctggaaggtgccactcccactgtcctttcctaataaaatgaggaaattgcatcgcattgtctgagtaggtgtcattctattctggggggtggggtggggcaggacagcaagggggaggattgggaagacaatagcaggcatgctggggatgcggtgggctctatggatttggctacagcaacagggtggtggacctcatggcccacatggcctccaaggagtaagacccctggaccaccagccccagcaagagcacaagaggaagagagagaccctcactgctggggagtccctgccacactcagtcccccaccacactgaatctcccctcctcacagttgccatgtagaccccttgaagaggggaggggcctagggagccgcaccttgtcatgtaccatcaataaagtaccctgtgctcaaccagttacttgtcctgtcttattctagggtctggggcagaggggagggaagctgggcttgtgtcaaggtgagacattcttgctggggagggacctggtatgttctcctcagactgagggtagggcctccaaacagccttgcttgcttcgagaaccatttgcttcccgctcagacgtcttgagtgctacaggaagctggcaccactacttcagagaacaaggccttttcctctcctcgctccagt

SEQ ID NO: 210 - DNA, 3413 bp, Artificial Sequence
  Description of Artificial Sequence: Synthetic polynucleotide
gaagactgtggatggcccctccgggaaactgtggcgtgatggccgcggggctctccagaacatcatccctgcctctactggcgctgccaaggctgtgggcaaggtcatccctgagctgaacgggaagctcactggcatggccttccgtgtccccactgccaacgtgtcagtggtggacctgacctgccgtctagaaaaacctgccaaatatgatgacatcaagaaggtggtgaagcaggcgtcggagggccccctcaagggcatcctgggctacactgagcaccaggtggtctcctctgacttcaacagcgacacccactcctccacctttgacgctggggctggcattgccctcaacgaccactttgtcaagctcatttcctggtatgtggctggggccagagactggctcttaaaaagtgcagggtctggcgccctctggtggctggctcagaaaaagggccctgacaactctttacatcttctaggtatgacaacgagttcggatatagcaatagagtggtcgatctgatggctcatatggctagcaaagagggaagcggagctactaacttcagcctgctgaagcaggctggagacgtggaggagaaccctggacctatggattggacctggatcctgtttctggtggccgctgccacaagagtgcacagcaattgggtcaacgtgatcagcgacctgaagaagatcgaggacctgatccagagcatgcacatcgacgccacactgtacaccgagtccgatgtgcaccctagctgcaaagtgaccgccatgaagtgctttctgctggaactgcaagtgatcagcctggaaagcggcgacgccagcatccacgataccgtggaaaacctgatcatcctggccaacaacagcctgagcagcaacggcaatgtgaccgagagcggctgcaaagagtgcgaggaactggaagagaagaacatcaaagagttcctccagagcttcgtccacatcgtgcagatgttcatcaacaccagctctggcggaggaagcggaggcggaggatctggtggtggtggatctggcggcggtggtagtggcggaggttctctgcaaatcacctgtcctccacctatgagcgtggaacacgccgacatctgggtcaagagctacagcctgtacagcagagagcggtacatctgcaacagcggcttcaagagaaaggccggcacaagcagcctgaccgagtgtgtgctgaacaaggccacaaacgtggcccactggaccacacctagcctgaagtgcatcagagatcccgctctggttcatcagaggcctgcccctccatctacagtgacaacagctggcgtgacccctcagcctgagtctctgtctccatctggaaaagagcctgccgccagctctcccagctctaacaatactgctgccaccacagccgctatcgtgcctggatctcagctgatgcctagcaagagccctagcaccggcacaacagagatcagctctcacgagagcagccacggaacaccttctcagaccaccgccaagaattgggagctgacagcctctgcctctcatcagccacctggcgtgtacccacagggccactctgatacaacagtggccatcagcaccagcaccgttctgctgtgtggcctgtctgctgttagcctgctggcctgctacctgaagtctagacagacacctcctctggccagcgtggaaatggaagccatggaagctctgcctgtcacatggggcaccagcagcagagatgaggacctcgagaattgcagccaccacctgggaagcggagccacaaacttctctctgctgaagcaggcaggagatgttgaagaaaaccctggacctatgtggcagctgttgctgccgacagccctcctgttgctggtctccgctggcatgagaaccgaggatctgcctaaggccgtggtgttcctggaacctcagtggtacagagtgctggaaaaggacagcgtgaccctgaagtgccagggcgcctattctcccgaggacaatagcacccagtggttccacaacgagagcctgatcagcagccaggccagcagctactttatcgatgccgccaccgtggacgacagcggcgagtacagatgccagaccaatctgagcaccctgagcgaccctgtgcagctggaagtgcacattggatggttgctgctgcaagcccctagatgggtgttcaaagaagaggaccccatccacctgagatgccactcttggaagaacacagccctgcacaaagtgacctacctgcagaacggcaagggcagaaagtacttccaccacaacagcgacttctacatccccaaggccacactgaaggactccggctcctacttctgcagaggcctggtcggcagcaagaacgtgtccagcgagacagtgaacatcaccatcacacagggcctcgccgtgtctaccatcagcagctttttcccacctggctatcaggtgtccttctgcctggtcatggtgctgctgttcgccgtggataccggcctgtacttcagcgtcaagaccaacatccggtccagcaccagagactggaaggaccacaagttcaagtggcggaaggaccctcaggacaagtaagcggccgcgtcgagtctagagggcccgtttaaacccgctgatcagcctcgactgtgccttctagttgccagccatctgttgtttgcccctcccccgtgccttccttgaccctggaaggtgccactcccactgtcctttcctaataaaatgaggaaattgcatcgcattgtctgagtaggtgtcattctattctggggggtggggtggggcaggacagcaagggggaggattgggaagacaatagcaggcatgctggggatgcggtgggctctatggatttggctacagcaacagggtggtggacctcatggcccacatggcctccaaggagtaagacccctggaccaccagccccagcaagagcacaagaggaagagagagaccctcactgctggggagtccctgccacactcagtcccccaccacactgaatctcccctcctcacagttgccatgtagaccccttgaagaggggaggggcctagggagccgcaccttgtcatgtaccatcaataaagtaccctgtgctcaaccagttacttgtcctgtcttattctagggtctggggcagaggggagggaagctgggcttgtgtcaaggtgagacattcttgctggggagggacctggtatgttctcctcagactgagggtagggcctccaaacagccttgcttgcttcgagaaccatttgcttcccgctcagacgtcttgagtgctacaggaagctggcaccactacttcagagaacaaggccttttcctctcctcgctccagt

SEQ ID NO: 211 - DNA, 3401 bp, Artificial Sequence
  Description of Artificial Sequence: Synthetic polynucleotide
gaagactgtggatggcccctccgggaaactgtggcgtgatggccgcggggctctccagaacatcatccctgcctctactggcgctgccaaggctgtgggcaaggtcatccctgagctgaacgggaagctcactggcatggccttccgtgtccccactgccaacgtgtcagtggtggacctgacctgccgtctagaaaaacctgccaaatatgatgacatcaagaaggtggtgaagcaggcgtcggagggccccctcaagggcatcctgggctacactgagcaccaggtggtctcctctgacttcaacagcgacacccactcctccacctttgacgctggggctggcattgccctcaacgaccactttgtcaagctcatttcctggtatgtggctggggccagagactggctcttaaaaagtgcagggtctggcgccctctggtggctggctcagaaaaagggccctgacaactctttacatcttctaggtatgacaacgagttcggatatagcaatagagtggtcgatctgatggctcatatggctagcaaagagggaagcggagctactaacttcagcctgctgaagcaggctggagacgtggaggagaaccctggacctatggattggacctggatcctgtttctggtggccgctgccacaagagtgcacagcaattgggtcaacgtgatcagcgacctgaagaagatcgaggacctgatccagagcatgcacatcgacgccacactgtacaccgagtccgatgtgcaccctagctgcaaagtgaccgccatgaagtgctttctgctggaactgcaagtgatcagcctggaaagcggcgacgccagcatccacgataccgtggaaaacctgatcatcctggccaacaacagcctgagcagcaacggcaatgtgaccgagagcggctgcaaagagtgcgaggaactggaagagaagaacatcaaagagttcctccagagcttcgtccacatcgtgcagatgttcatcaacaccagcggaagcggagccacaaacttctctctgctgaagcaggcaggagatgttgaagaaaaccctggacctatcacctgtcctccacctatgagcgtggaacacgccgacatctgggtcaagagctacagcctgtacagcagagagcggtacatctgcaacagcggcttcaagagaaaggccggcacaagcagcctgaccgagtgtgtgctgaacaaggccacaaacgtggcccactggaccacacctagcctgaagtgcatcagagatcccgctctggttcatcagaggcctgcccctccatctacagtgacaacagctggcgtgacccctcagcctgagtctctgtctccatctggaaaagagcctgccgccagctctcccagctctaacaatactgctgccaccacagccgctatcgtgcctggatctcagctgatgcctagcaagagccctagcaccggcacaacagagatcagctctcacgagagcagccacggaacaccttctcagaccaccgccaagaattgggagctgacagcctctgcctctcatcagccacctggcgtgtacccacagggccactctgatacaacagtggccatcagcaccagcaccgttctgctgtgtggcctgtctgctgttagcctgctggcctgctacctgaagtctagacagacacctcctctggccagcgtggaaatggaagccatggaagctctgcctgtcacatggggcaccagcagcagagatgaggacctcgagaattgcagccaccacctgggaagcggagccacaaacttctctctgctgaagcaggcaggagatgttgaagaaaaccctggacctatgtggcagctgttgctgccgacagccctcctgttgctggtctccgctggcatgagaaccgaggatctgcctaaggccgtggtgttcctggaacctcagtggtacagagtgctggaaaaggacagcgtgaccctgaagtgccagggcgcctattctcccgaggacaatagcacccagtggttccacaacgagagcctgatcagcagccaggccagcagctactttatcgatgccgccaccgtggacgacagcggcgagtacagatgccagaccaatctgagcaccctgagcgaccctgtgcagctggaagtgcacattggatggttgctgctgcaagcccctagatgggtgttcaaagaagaggaccccatccacctgagatgccactcttggaagaacacagccctgcacaaagtgacctacctgcagaacggcaagggcagaaagtacttccaccacaacagcgacttctacatccccaaggccacactgaaggactccggctcctacttctgcagaggcctggtcggcagcaagaacgtgtccagcgagacagtgaacatcaccatcacacagggcctcgccgtgtctaccatcagcagctttttcccacctggctatcaggtgtccttctgcctggtcatggtgctgctgttcgccgtggataccggcctgtacttcagcgtcaagaccaacatccggtccagcaccagagactggaaggaccacaagttcaagtggcggaaggaccctcaggacaagtaagcggccgcgtcgagtctagagggcccgtttaaacccgctgatcagcctcgactgtgccttctagttgccagccatctgttgtttgcccctcccccgtgccttccttgaccctggaaggtgccactcccactgtcctttcctaataaaatgaggaaattgcatcgcattgtctgagtaggtgtcattctattctggggggtggggtggggcaggacagcaagggggaggattgggaagacaatagcaggcatgctggggatgcggtgggctctatggatttggctacagcaacagggtggtggacctcatggcccacatggcctccaaggagtaagacccctggaccaccagccccagcaagagcacaagaggaagagagagaccctcactgctggggagtccctgccacactcagtcccccaccacactgaatctcccctcctcacagttgccatgtagaccccttgaagaggggaggggcctagggagccgcaccttgtcatgtaccatcaataaagtaccctgtgctcaaccagttacttgtcctgtcttattctagggtctggggcagaggggagggaagctgggcttgtgtcaaggtgagacattcttgctggggagggacctggtatgttctcctcagactgagggtagggcctccaaacagccttgcttgcttcgagaaccatttgcttcccgctcagacgtcttgagtgctacaggaagctggcaccactacttcagagaacaaggccttttcctctcctcgctccagt

SEQ ID NO: 212 - DNA, 3413 bp, Artificial Sequence
  Description of Artificial Sequence: Synthetic polynucleotide
gaagactgtggatggcccctccgggaaactgtggcgtgatggccgcggggctctccagaacatcatccctgcctctactggcgctgccaaggctgtgggcaaggtcatccctgagctgaacgggaagctcactggcatggccttccgtgtccccactgccaacgtgtcagtggtggacctgacctgccgtctagaaaaacctgccaaatatgatgacatcaagaaggtggtgaagcaggcgtcggagggccccctcaagggcatcctgggctacactgagcaccaggtggtctcctctgacttcaacagcgacacccactcctccacctttgacgctggggctggcattgccctcaacgaccactttgtcaagctcatttcctggtatgtggctggggccagagactggctcttaaaaagtgcagggtctggcgccctctggtggctggctcagaaaaagggccctgacaactctttacatcttctaggtatgacaacgagttcggatatagcaatagagtggtcgatctgatggctcatatggctagcaaagagggaagcggagctactaacttcagcctgctgaagcaggctggagacgtggaggagaaccctggacctatgtggcagctgttgctgccgacagccctcctgttgctggtctccgctggcatgagaaccgaggatctgcctaaggccgtggtgttcctggaacctcagtggtacagagtgctggaaaaggacagcgtgaccctgaagtgccagggcgcctattctcccgaggacaatagcacccagtggttccacaacgagagcctgatcagcagccaggccagcagctactttatcgatgccgccaccgtggacgacagcggcgagtacagatgccagaccaatctgagcaccctgagcgaccctgtgcagctggaagtgcacattggatggttgctgctgcaagcccctagatgggtgttcaaagaagaggaccccatccacctgagatgccactcttggaagaacacagccctgcacaaagtgacctacctgcagaacggcaagggcagaaagtacttccaccacaacagcgacttctacatccccaaggccacactgaaggactccggctcctacttctgcagaggcctggtcggcagcaagaacgtgtccagcgagacagtgaacatcaccatcacacagggcctcgccgtgtctaccatcagcagctttttcccacctggctatcaggtgtccttctgcctggtcatggtgctgctgttcgccgtggataccggcctgtacttcagcgtcaagaccaacatccggtccagcaccagagactggaaggaccacaagttcaagtggcggaaggaccctcaggacaagggaagcggagccacaaacttctctctgctgaagcaggcaggagatgttgaagaaaaccctggacctatggattggacctggatcctgtttctggtggccgctgccacaagagtgcacagcaattgggtcaacgtgatcagcgacctgaagaagatcgaggacctgatccagagcatgcacatcgacgccacactgtacaccgagtccgatgtgcaccctagctgcaaagtgaccgccatgaagtgctttctgctggaactgcaagtgatcagcctggaaagcggcgacgccagcatccacgataccgtggaaaacctgatcatcctggccaacaacagcctgagcagcaacggcaatgtgaccgagagcggctgcaaagagtgcgaggaactggaagagaagaacatcaaagagttcctccagagcttcgtccacatcgtgcagatgttcatcaacaccagctctggcggaggaagcggaggcggaggatctggtggtggtggatctggcggcggtggtagtggcggaggttctctgcaaatcacctgtcctccacctatgagcgtggaacacgccgacatctgggtcaagagctacagcctgtacagcagagagcggtacatctgcaacagcggcttcaagagaaaggccggcacaagcagcctgaccgagtgtgtgctgaacaaggccacaaacgtggcccactggaccacacctagcctgaagtgcatcagagatcccgctctggttcatcagaggcctgcccctccatctacagtgacaacagctggcgtgacccctcagcctgagtctctgtctccatctggaaaagagcctgccgccagctctcccagctctaacaatactgctgccaccacagccgctatcgtgcctggatctcagctgatgcctagcaagagccctagcaccggcacaacagagatcagctctcacgagagcagccacggaacaccttctcagaccaccgccaagaattgggagctgacagcctctgcctctcatcagccacctggcgtgtacccacagggccactctgatacaacagtggccatcagcaccagcaccgttctgctgtgtggcctgtctgctgttagcctgctggcctgctacctgaagtctagacagacacctcctctggccagcgtggaaatggaagccatggaagctctgcctgtcacatggggcaccagcagcagagatgaggacctcgagaattgcagccaccacctgtaagcggccgcgtcgagtctagagggcccgtttaaacccgctgatcagcctcgactgtgccttctagttgccagccatctgttgtttgcccctcccccgtgccttccttgaccctggaaggtgccactcccactgtcctttcctaataaaatgaggaaattgcatcgcattgtctgagtaggtgtcattctattctggggggtggggtggggcaggacagcaagggggaggattgggaagacaatagcaggcatgctggggatgcggtgggctctatggatttggctacagcaacagggtggtggacctcatggcccacatggcctccaaggagtaagacccctggaccaccagccccagcaagagcacaagaggaagagagagaccctcactgctggggagtccctgccacactcagtcccccaccacactgaatctcccctcctcacagttgccatgtagaccccttgaagaggggaggggcctagggagccgcaccttgtcatgtaccatcaataaagtaccctgtgctcaaccagttacttgtcctgtcttattctagggtctggggcagaggggagggaagctgggcttgtgtcaaggtgagacattcttgctggggagggacctggtatgttctcctcagactgagggtagggcctccaaacagccttgcttgcttcgagaaccatttgcttcccgctcagacgtcttgagtgctacaggaagctggcaccactacttcagagaacaaggccttttcctctcctcgctccagt

SEQ ID NO: 213 - DNA, 3413 bp, Artificial Sequence; identical to SEQ ID NO: 212
  Description of Artificial Sequence: Synthetic polynucleotide

SEQ ID NO: 214 - DNA, 2174 bp, Artificial Sequence
  Description of Artificial Sequence: Synthetic polynucleotide
gaagactgtggatggcccctccgggaaactgtggcgtgatggccgcggggctctccagaacatcatccctgcctctactggcgctgccaaggctgtgggcaaggtcatccctgagctgaacgggaagctcactggcatggccttccgtgtccccactgccaacgtgtcagtggtggacctgacctgccgtctagaaaaacctgccaaatatgatgacatcaagaaggtggtgaagcaggcgtcggagggccccctcaagggcatcctgggctacactgagcaccaggtggtctcctctgacttcaacagcgacacccactcctccacctttgacgctggggctggcattgccctcaacgaccactttgtcaagctcatttcctggtatgtggctggggccagagactggctcttaaaaagtgcagggtctggcgccctctggtggctggctcagaaaaagggccctgacaactctttacatcttctaggtatgacaacgagttcggatatagcaatagagtggtcgatctgatggctcatatggctagcaaagagggaagcggagctactaacttcagcctgctgaagcaggctggagacgtggaggagaaccctggacctatgtcaaatattacagatccacagatgtgggattttgatgatctaaatttcactggcatgccacctgcagatgaagattacagcccctgtatgctagaaactgagacactcaacaagtatgttgtgatcatcgcctatgccctagtgttcctgctgagcctgctgggaaactccctggtgatgctggtcatcttatacagcagggtcggccgctccgtcactgatgtctacctgctgaacctggccttggccgacctactctttgccctgaccttgcccatctgggccgcctccaaggtgaatggctggatttttggcacattcctgtgcaaggtggtctcactcctgaaggaagtcaacttctacagtggcatcctgctgttggcctgcatcagtgtggaccgttacctggccattgtccatgccacacgcacactgacccagaagcgtcacttggtcaagtttgtttgtcttggctgctggggactgtctatgaatctgtccctgcccttcttccttttccgccaggcttaccatccaaacaattccagtccagtttgctatgaggtcctgggaaatgacacagcaaaatggcggatggtgttgcggatcctgcctcacacctttggcttcatcgtgccgctgtttgtcatgctgttctgctatggattcaccctgcgtacactgtttaaggcccacatggggcagaagcaccgagccatgagggtcatctttgctgtcgtcctcatcttcctgctttgctggctgccctacaacctggtcctgctggcagacaccctcatgaggacccaggtgatccaggagagctgtgagcgccgcaacaacatcggccgggccctggatgccactgagattctgggatttctccatagctgcctcaaccccatcatctacgccttcatcggccaaaattttcgccatggattcctcaagatcctggctatgcatggcctggtcagcaaggagttcttggcacgtcatcgtgttacctcctacacttcttcgtctgtcaatgtctcttccaacctctgaatttggctacagcaacagggtggtggacctcatggcccacatggcctccaaggagtaagacccctggaccaccagccccagcaagagcacaagaggaagagagagaccctcactgctggggagtccctgccacactcagtcccccaccacactgaatctcccctcctcacagttgccatgtagaccccttgaagaggggaggggcctagggagccgcaccttgtcatgtaccatcaataaagtaccctgtgctcaaccagttacttgtcctgtcttattctagggtctggggcagaggggagggaagctgggcttgtgtcaaggtgagacattcttgctggggagggacctggtatgttctcctcagactgagggtagggcctccaaacagccttgcttgcttcgagaaccatttgcttcccgctcagacgtcttgagtgctacaggaagctggcaccactacttcagagaacaaggccttttcctctcctcgctccagt

SEQ ID NO: 215 - DNA, 2369 bp, Artificial Sequence
  Description of Artificial Sequence: Synthetic polynucleotide
gaagactgtggatggcccctccgggaaactgtggcgtgatggccgcggggctctccagaacatcatccctgcctctactggcgctgccaaggctgtgggcaaggtcatccctgagctgaacgggaagctcactggcatggccttccgtgtccccactgccaacgtgtcagtggtggacctgacctgccgtctagaaaaacctgccaaatatgatgacatcaagaaggtggtgaagcaggcgtcggagggccccctcaagggcatcctgggctacactgagcaccaggtggtctcctctgacttcaacagcgacacccactcctccacctttgacgctggggctggcattgccctcaacgaccactttgtcaagctcatttcctggtatgtggctggggccagagactggctcttaaaaagtgcagggtctggcgccctctggtggctggctcagaaaaagggccctgacaactctttacatcttctaggtatgacaacgagttcggatatagcaatagagtggtcgatctgatggctcatatggctagcaaagagggaagcggagctactaacttcagcctgctgaagcaggctggagacgtggaggagaaccctggacctatggagttgaggaagtacggccctggaagactggcggggacagttataggaggagctgctcagagtaaatcacagactaaatcagactcaatcacaaaagagttcctgccaggcctttacacagccccttcctccccgttcccgccctcacaggtgagtgaccaccaagtgctaaatgacgccgaggttgccgccctcctggagaacttcagctcttcctatgactatggagaaaacgagagtgactcgtgctgtacctccccgccctgcccacaggacttcagcctgaacttcgaccgggccttcctgccagccctctacagcctcctctttctgctggggctgctgggcaacggcgcggtggcagccgtgctgctgagccggcggacagccctgagcagcaccgacaccttcctgctccacctagctgtagcagacacgctgctggtgctgacactgccgctctgggcagtggacgctgccgtccagtgggtctttggctctggcctctgcaaagtggcaggtgccctcttcaacatcaacttctacgcaggagccctcctgctggcctgcatcagctttgaccgctacctgaacatagttcatgccacccagctctaccgccgggggcccccggcccgcgtgaccctcacctgcctggctgtctgggggctctgcctgcttttcgccctcccagacttcatcttcctgtcggcccaccacgacgagcgcctcaacgccacccactgccaatacaacttcccacaggtgggccgcacggctctgcgggtgctgcagctggtggctggctttctgctgcccctgctggtcatggcctactgctatgcccacatcctggccgtgctgctggtttccaggggccagcggcgcctgcgggccatgcggctggtggtggtggtcgtggtggcctttgccctctgctggaccccctatcacctggtggtgctggtggacatcctcatggacctgggcgctttggcccgcaactgtggccgagaaagcagggtagacgtggccaagtcggtcacctcaggcctgggctacatgcactgctgcctcaacccgctgctctatgcctttgtaggggtcaagttccgggagcggatgtggatgctgctcttgcgcctgggctgccccaaccagagagggctccagaggcagccatcgtcttcccgccgggattcatcctggtctgagacctcagaggcctcctactcgggcttgtgaatttggctacagcaacagggtggtggacctcatggcccacatggcctccaaggagtaagacccctggaccaccagccccagcaagagcacaagaggaagagagagaccctcactgctggggagtccctgccacactcagtcccccaccacactgaatctcccctcctcacagttgccatgtagaccccttgaagaggggaggggcctagggagccgcaccttgtcatgtaccatcaataaagtaccctgtgctcaaccagttacttgtcctgtcttattctagggtctggggcagaggggagggaagctgggcttgtgtcaaggtgagacattcttgctggggagggacctggtatgttctcctcagactgagggtagggcctccaaacagccttgcttgcttcgagaaccatttgcttcccgctcagacgtcttgagtgctacaggaagctggcaccactacttcagagaacaaggccttttcctctcctcgctccagt

SEQ ID NO: 216 - DNA, 2228 bp, Artificial Sequence
  Description of Artificial Sequence: Synthetic polynucleotide
gaagactgtggatggcccctccgggaaactgtggcgtgatggccgcggggctctccagaacatcatccctgcctctactggcgctgccaaggctgtgggcaaggtcatccctgagctgaacgggaagctcactggcatggccttccgtgtccccactgccaacgtgtcagtggtggacctgacctgccgtctagaaaaacctgccaaatatgatgacatcaagaaggtggtgaagcaggcgtcggagggccccctcaagggcatcctgggctacactgagcaccaggtggtctcctctgacttcaacagcgacacccactcctccacctttgacgctggggctggcattgccctcaacgaccactttgtcaagctcatttcctggtatgtggctggggccagagactggctcttaaaaagtgcagggtctggcgccctctggtggctggctcagaaaaagggccctgacaactctttacatcttctaggtatgacaacgagttcggatatagcaatagagtggtcgatctgatggctcatatggctagcaaagagggaagcggagctactaacttcagcctgctgaagcaggctggagacgtggaggagaaccctggacctatggtccttgaggtgagtgaccaccaagtgctaaatgacgccgaggttgccgccctcctggagaacttcagctcttcctatgactatggagaaaacgagagtgactcgtgctgtacctccccgccctgcccacaggacttcagcctgaacttcgaccgggccttcctgccagccctctacagcctcctctttctgctggggctgctgggcaacggcgcggtggcagccgtgctgctgagccggcggacagccctgagcagcaccgacaccttcctgctccacctagctgtagcagacacgctgctggtgctgacactgccgctctgggcagtggacgctgccgtccagtgggtctttggctctggcctctgcaaagtggcaggtgccctcttcaacatcaacttctacgcaggagccctcctgctggcctgcatcagctttgaccgctacctgaacatagttcatgccacccagctctaccgccgggggcccccggcccgcgtgaccctcacctgcctggctgtctgggggctctgcctgcttttcgccctcccagacttcatcttcctgtcggcccaccacgacgagcgcctcaacgccacccactgccaatacaacttcccacaggtgggccgcacggctctgcgggtgctgcagctggtggctggctttctgctgcccctgctggtcatggcctactgctatgcccacatcctggccgtgctgctggtttccaggggccagcggcgcctgcgggccatgcggctggtggtggtggtcgtggtggcctttgccctctgctggaccccctatcacctggtggtgctggtggacatcctcatggacctgggcgctttggcccgcaactgtggccgagaaagcagggtagacgtggccaagtcggtcacctcaggcctgggctacatgcactgctgcctcaacccgctgctctatgcctttgtaggggtcaagttccgggagcggatgtggatgctgctcttgcgcctgggctgccccaaccagagagggctccagaggcagccatcgtcttcccgccgggattcatcctggtctgagacctcagaggcctcctactcgggcttgtgaatttggctacagcaacagggtggtggacctcatggcccacatggcctccaaggagtaagacccctggaccaccagccccagcaagagcacaagaggaagagagagaccctcactgctggggagtccctgccacactcagtcccccaccacactgaatctcccctcctcacagttgccatgtagaccccttgaagaggggaggggcctagggagccgcaccttgtcatgtaccatcaataaagtaccctgtgctcaaccagttacttgtcctgtcttattctagggtctggggcagaggggagggaagctgggcttgtgtcaaggtgagacattcttgctggggagggacctggtatgttctcctcagactgagggtagggcctccaaacagccttgcttgcttcgagaaccatttgcttcccgctcagacgtcttgagtgctacaggaagctggcaccactacttcagagaacaaggccttttcctctcctcgctccagt

SEQ ID NO: 217 - DNA, 2180 bp, Artificial Sequence
  Description of Artificial Sequence: Synthetic polynucleotide
gaagactgtggatggcccctccgggaaactgtggcgtgatggccgcggggctctccagaacatcatccctgcctctactggcgctgccaaggctgtgggcaaggtcatccctgagctgaacgggaagctcactggcatggccttccgtgtccccactgccaacgtgtcagtggtggacctgacctgccgtctagaaaaacctgccaaatatgatgacatcaagaaggtggtgaagcaggcgtcggagggccccctcaagggcatcctgggctacactgagcaccaggtggtctcctctgacttcaacagcgacacccactcctccacctttgacgctggggctggcattgccctcaacgaccactttgtcaagctcatttcctggtatgtggctggggccagagactggctcttaaaaagtgcagggtctggcgccctctggtggctggctcagaaaaagggccctgacaactctttacatcttctaggtatgacaacgagttcggatatagcaatagagtggtcgatctgatggctcatatggctagcaaagagggaagcggagctactaacttcagcctgctgaagcaggctggagacgtggaggagaaccctggacctatggattatcaagtgtcaagtccaatctatgacatcaattattatacatcggagccctgccaaaaaatcaatgtgaagcaaatcgcagcccgcctcctgcctccgctctactcactggtgttcatctttggttttgtgggcaacatgctggtcatcctcatcctgataaactgcaaaaggctgaagagcatgactgacatctacctgctcaacctggccatctctgacctgtttttccttcttactgtccccttctgggctcactatgctgccgcccagtgggactttggaaatacaatgtgtcaactcttgacagggctctattttataggcttcttctctggaatcttcttcatcatcctcctgacaatcgataggtacctggctgtcgtccatgctgtgtttgctttaaaagccaggacggtcacctttggggtggtgacaagtgtgatcacttgggtggtggctgtgtttgcgtctctcccaggaatcatctttaccagatctcaaaaagaaggtcttcattacacctgcagctctcattttccatacagtcagtatcaattctggaagaatttccagacattaaagatagtcatcttggggctggtcctgccgctgcttgtcatggtcatctgctactcgggaatcctaaaaactctgcttcggtgtcgaaatgagaagaagaggcacagggctgtgaggcttatcttcaccatcatgattgtttattttctcttctgggctccctacaacattgtccttctcctgaacaccttccaggaattctttggcctgaataattgcagtagctctaacaggttggaccaagctatgcaggtgacagagactcttgggatgacgcactgctgcatcaaccccatcatctatgcctttgtcggggagaagttcagaaactacctcttagtcttcttccaaaagcacattgccaaacgcttctgcaaatgctgttctattttccagcaagaggctcccgagcgagcaagctcagtttacacccgatccactggggagcaggaaatatctgtgggcttgtgaatttggctacagcaacagggtggtggacctcatggcccacatggcctccaaggagtaagacccctggaccaccagccccagcaagagcacaagaggaagagagagaccctcactgctggggagtccctgccacactcagtcccccaccacactgaatctcccctcctcacagttgccatgtagaccccttgaagaggggaggggcctagggagccgcaccttgtcatgtaccatcaataaagtaccctgtgctcaaccagttacttgtcctgtcttattctagggtctggggcagaggggagggaagctgggcttgtgtcaaggtgagacattcttgctggggagggacctggtatgttctcctcagactgagggtagggcctccaaacagccttgcttgcttcgagaaccatttgcttcccgctcagacgtcttgagtgctacaggaagctggcaccactacttcagagaacaaggccttttcctctcctcgctccagt

SEQ ID NO: 218 - DNA, 2246 bp, Artificial Sequence
  Description of Artificial Sequence: Synthetic polynucleotide
gaagactgtggatggcccctccgggaaactgtggcgtgatggccgcggggctctccagaacatcatccctgcctctactggcgctgccaaggctgtgggcaaggtcatccctgagctgaacgggaagctcactggcatggccttccgtgtccccactgccaacgtgtcagtggtggacctgacctgccgtctagaaaaacctgccaaatatgatgacatcaagaaggtggtgaagcaggcgtcggagggccccctcaagggcatcctgggctacactgagcaccaggtggtctcctctgacttcaacagcgacacccactcctccacctttgacgctggggctggcattgccctcaacgaccactttgtcaagctcatttcctggtatgtggctggggccagagactggctcttaaaaagtgcagggtctggcgccctctggtggctggctcagaaaaagggccctgacaactctttacatcttctaggtatgacaacgagttcggatatagcaatagagtggtcgatctgatggctcatatggctagcaaagagggaagcggagctactaacttcagcctgctgaagcaggctggagacgtggaggagaaccctggacctatgctgtccacatctcgttctcggtttatcagaaataccaacgagagcggtgaagaagtcaccaccttttttgattatgattacggtgctccctgtcataaatttgacgtgaagcaaattggggcccaactcctgcctccgctctactcgctggtgttcatctttggttttgtgggcaacatgctggtcgtcctcatcttaataaactgcaaaaagctgaagtgcttgactgacatttacctgctcaacctggccatctctgatctgctttttcttattactctcccattgtgggctcactctgctgcaaatgagtgggtctttgggaatgcaatgtgcaaattattcacagggctgtatcacatcggttattttggcggaatcttcttcatcatcctcctgacaatcgatagatacctggctattgtccatgctgtgtttgctttaaaagccaggacggtcacctttggggtggtgacaagtgtgatcacctggttggtggctgtgtttgcttctgtcccaggaatcatctttactaaatgccagaaagaagattctgtttatgtctgtggcccttattttccacgaggatggaataatttccacacaataatgaggaacattttggggctggtcctgccgctgctcatcatggtcatctgctactcgggaatcctgaaaaccctgcttcggtgtcgaaacgagaagaagaggcatagggcagtgagagtcatcttcaccatcatgattgtttactttctcttctggactccctataatattgtcattctcctgaacaccttccaggaattcttcggcctgagtaactgtgaaagcaccagtcaactggaccaagccacgcaggtgacagagactcttgggatgactcactgctgcatcaatcccatcatctatgccttcgttggggagaagttcagaagcctttttcacatagctcttggctgtaggattgccccactccaaaaaccagtgtgtggaggtccaggagtgagaccaggaaagaatgtgaaagtgactacacaaggactcctcgatggtcgtggaaaaggaaagtcaattggcagagcccctgaagccagtcttcaggacaaagaaggagcctagatttggctacagcaacagggtggtggacctcatggcccacatggcctccaaggagtaagacccctggaccaccagccccagcaagagcacaagaggaagagagagaccctcactgctggggagtccctgccacactcagtcccccaccacactgaatctcccctcctcacagttgccatgtagaccccttgaagaggggaggggcctagggagccgcaccttgtcatgtaccatcaataaagtaccctgtgctcaaccagttacttgtcctgtcttattctagggtctggggcagaggggagggaagctgggcttgtgtcaaggtgagacattcttgctggggagggacctggtatgttctcctcagactgagggtagggcctccaaacagccttgcttgcttcgagaaccatttgcttcccgctcagacgtcttgagtgctacaggaagctggcaccactacttcagagaacaaggccttttcctctcctcgctccagt

SEQ ID NO: 219 - DNA, 24 bp, Artificial Sequence
  Description of Artificial Sequence: Synthetic primer
catcgcattgtctgagtaggtgtc

SEQ ID NO: 220 - DNA, 22 bp, Artificial Sequence
  Description of Artificial Sequence: Synthetic primer
tgcccacagaatagcttcttcc

SEQ ID NO: 221 - DNA, 20 bp, Artificial Sequence
  Description of Artificial Sequence: Synthetic probe
tcccctcctcacagttgcca

SEQ ID NO: 222 - DNA, 22 bp, Artificial Sequence
  Description of Artificial Sequence: Synthetic primer
ggagaaagtgtccaggcataag

SEQ ID NO: 223 - DNA, 22 bp, Artificial Sequence
  Description of Artificial Sequence: Synthetic primer
ctccatcccactatgaccattc

SEQ ID NO: 224 - DNA, 22 bp, Artificial Sequence
  Description of Artificial Sequence: Synthetic probe
agtttgtgtcaggatgggtggt

SEQ ID NO: 225 - DNA, 21 bp, Artificial Sequence
  Description of Artificial Sequence: Synthetic oligonucleotide
aggctttggctggttctttag

SEQ ID NO: 226 - DNA, 21 bp, Artificial Sequence
  Description of Artificial Sequence: Synthetic oligonucleotide
gctggttctttagtcagcttc

SEQ ID NO: 227 - DNA, 21 bp, Artificial Sequence
  Description of Artificial Sequence: Synthetic oligonucleotide
gtcagcttcttcctctgattc

SEQ ID NO: 228 - DNA, 21 bp, Artificial Sequence
  Description of Artificial Sequence: Synthetic oligonucleotide
taaccaggttagccactgatt

SEQ ID NO: 229 - DNA, 21 bp, Artificial Sequence
  Description of Artificial Sequence: Synthetic oligonucleotide
acaaaagacttacctggaaca

SEQ ID NO: 230 - DNA, 21 bp, Artificial Sequence
  Description of Artificial Sequence: Synthetic oligonucleotide
ccggaaactcttgggttatat

SEQ ID NO: 231 - DNA, 21 bp, Artificial Sequence
  Description of Artificial Sequence: Synthetic oligonucleotide
caagccaagaaagcttcttct

SEQ ID NO: 232 - DNA, 21 bp, Artificial Sequence
  Description of Artificial Sequence: Synthetic oligonucleotide
catgtcatagaagtgcacaaa

SEQ ID NO: 233 - DNA, 21 bp, Artificial Sequence
  Description of Artificial Sequence: Synthetic oligonucleotide
ggaagttgctgttatagcagt

SEQ ID NO: 234 - DNA, 21 bp, Artificial Sequence
  Description of Artificial Sequence: Synthetic oligonucleotide
tgcattactggcttgaaagat

SEQ ID NO: 235 - DNA, 21 bp, Artificial Sequence
  Description of Artificial Sequence: Synthetic oligonucleotide
ctgctctaactgttctttgga

SEQ ID NO: 236 - DNA, 21 bp, Artificial Sequence
  Description of Artificial Sequence: Synthetic oligonucleotide
gaaggagcagaggatgaatct

SEQ ID NO: 237 - DNA, 21 bp, Artificial Sequence
  Description of Artificial Sequence: Synthetic oligonucleotide
atcgctgggggggtttacttc

SEQ ID NO: 238 - DNA, 21 bp, Artificial Sequence
  Description of Artificial Sequence: Synthetic oligonucleotide
cttcactagaaatgtactgta

SEQ ID NO: 239 - DNA, 21 bp, Artificial Sequence
  Description of Artificial Sequence: Synthetic oligonucleotide
tctacatgaagtttgggagag

SEQ ID NO: 240 - DNA, 21 bp, Artificial Sequence
  Description of Artificial Sequence: Synthetic oligonucleotide
ggagagatgttatctttaatc

SEQ ID NO: 241 - DNA, 21 bp, Artificial Sequence
  Description of Artificial Sequence: Synthetic oligonucleotide
tatatggtttgaggggatgga

SEQ ID NO: 242 - DNA, 21 bp, Artificial Sequence
  Description of Artificial Sequence: Synthetic oligonucleotide
aggggatggatccaactttat

SEQ ID NO: 243 - DNA, 21 bp, Artificial Sequence
  Description of Artificial Sequence: Synthetic oligonucleotide
taggtgaatcagtggctaacc

SEQ ID NO: 244 - DNA, 21 bp, Artificial Sequence
  Description of Artificial Sequence: Synthetic oligonucleotide
caaatcttaatttataggtga

SEQ ID NO: 245 - DNA, 21 bp, Artificial Sequence
  Description of Artificial Sequence: Synthetic oligonucleotide
atttacaaatcttaatttata

SEQ ID NO: 246 - DNA, 21 bp, Artificial Sequence
  Description of Artificial Sequence: Synthetic oligonucleotide
cgggaaaaggcaaggctttgt

SEQ ID NO: 247 - DNA, 21 bp, Artificial Sequence
  Description of Artificial Sequence: Synthetic oligonucleotide
ttggcttggaaagaagatata

SEQ ID NO: 248 - DNA, 21 bp, Artificial Sequence
  Description of Artificial Sequence: Synthetic oligonucleotide
tgcacttctatgacatggaaa

SEQ ID NO: 249 - DNA, 21 bp, Artificial Sequence
  Description of Artificial Sequence: Synthetic oligonucleotide
aggcatgttacttcgcttttt

SEQ ID NO: 250 - DNA, 21 bp, Artificial Sequence
  Description of Artificial Sequence: Synthetic oligonucleotide
ttcatgatcacgttgatctac

SEQ ID NO: 251 - DNA, 21 bp, Artificial Sequence
  Description of Artificial Sequence: Synthetic oligonucleotide
aagccagtaatgcagaaattt

SEQ ID NO: 252 - DNA, 21 bp, Artificial Sequence
  Description of Artificial Sequence: Synthetic oligonucleotide
tagtgaagtaaacccccccag

SEQ ID NO: 253 - DNA, 21 bp, Artificial Sequence
  Description of Artificial Sequence: Synthetic oligonucleotide
tgtccagcttcttacagtaca

SEQ ID NO: 254 - DNA, 21 bp, Artificial Sequence
  Description of Artificial Sequence: Synthetic oligonucleotide
tgaacatcttaatgactaggt

SEQ ID NO: 255 - DNA, 21 bp, Artificial Sequence
  Description of Artificial Sequence: Synthetic oligonucleotide
aagaccttaccttttttaata

SEQ ID NO: 256 - DNA, 21 bp, Artificial Sequence
  Description of Artificial Sequence: Synthetic oligonucleotide
caatgaacttaccttccaaca

SEQ ID NO: 257 - DNA, 21 bp, Artificial Sequence
  Description of Artificial Sequence: Synthetic oligonucleotide
agcagggcagaataaaaacca

SEQ ID NO: 258 - DNA, 21 bp, Artificial Sequence
  Description of Artificial Sequence: Synthetic oligonucleotide
ttcataatttcagcagggcag

SEQ ID NO: 259 - DNA, 21 bp, Artificial Sequence
  Description of Artificial Sequence: Synthetic oligonucleotide
ctttgttcataatttcagcag

SEQ ID NO: 260 - DNA, 21 bp, Artificial Sequence
  Description of Artificial Sequence: Synthetic oligonucleotide
caggctgcaaactacttagac

SEQ ID NO: 261 - DNA, 21 bp, Artificial Sequence
  Description of Artificial Sequence: Synthetic oligonucleotide
ttgttgtaggtcattcagtgg

SEQ ID NO: 262 - DNA, 21 bp, Artificial Sequence
  Description of Artificial Sequence: Synthetic oligonucleotide
ttagatttgggaatggatgat

SEQ ID NO: 263 - DNA, 21 bp, Artificial Sequence
  Description of Artificial Sequence: Synthetic oligonucleotide
ttctggttttcttagatttgg

SEQ ID NO: 264 - DNA, 21 bp, Artificial Sequence
  Description of Artificial Sequence: Synthetic oligonucleotide
gatgccttcaattaagttgca

SEQ ID NO: 265 - DNA, 21 bp, Artificial Sequence
  Description of Artificial Sequence: Synthetic oligonucleotide
atgtcctttttttttagatgc

SEQ ID NO: 266 - DNA, 21 bp, Artificial Sequence
  Description of Artificial Sequence: Synthetic oligonucleotide
aagctttatgctgaaaaggtg

SEQ ID NO: 267 - DNA, 21 bp, Artificial Sequence
  Description of Artificial Sequence: Synthetic oligonucleotide
aagggcctgctatggtgtgct

SEQ ID NO: 268 - DNA, 21 bp, Artificial Sequence
  Description of Artificial Sequence: Synthetic oligonucleotide
aaggaagcaagggatatcctg

SEQ ID NO: 269 - DNA, 21 bp, Artificial Sequence
  Description of Artificial Sequence: Synthetic oligonucleotide
agcataaagctttaaaggaag

SEQ ID NO: 270 - DNA, 21 bp, Artificial Sequence
  Description of Artificial Sequence: Synthetic oligonucleotide
ccagacaccacaacctcgcag

SEQ ID NO: 271 - DNA, 21 bp, Artificial Sequence
  Description of Artificial Sequence: Synthetic oligonucleotide
ccaagcactctcagctgctca

SEQ ID NO: 272 - DNA, 21 bp, Artificial Sequence
  Description of Artificial Sequence: Synthetic oligonucleotide
ttcttccatcttttcccacag

SEQ ID NO: 273 - DNA, 21 bp, Artificial Sequence
  Description of Artificial Sequence: Synthetic oligonucleotide
ccacaggtggcagctgccaac

SEQ ID NO: 274 - DNA, 21 bp, Artificial Sequence
  Description of Artificial Sequence: Synthetic oligonucleotide
tctgacgtcccccatagatct

SEQ ID NO: 275 - DNA, 21 bp, Artificial Sequence
  Description of Artificial Sequence: Synthetic oligonucleotide
agccctcttaccttccacctc

SEQ ID NO: 276 - DNA, 21 bp, Artificial Sequence
  Description of Artificial Sequence: Synthetic oligonucleotide
tgttcatttattgaagttcta

SEQ ID NO: 277 - DNA, 21 bp, Artificial Sequence
  Description of Artificial Sequence: Synthetic oligonucleotide
gttcggccttcttcctcttct

SEQ ID NO: 278 - DNA, 21 bp, Artificial Sequence
  Description of Artificial Sequence: Synthetic oligonucleotide
tagaccatgtctgctaaagag

SEQ ID NO: 279 - DNA, 21 bp, Artificial Sequence
  Description of Artificial Sequence: Synthetic oligonucleotide
gaaaaataactaaacatgggc

SEQ ID NO: 280 - DNA, 21 bp, Artificial Sequence
  Description of Artificial Sequence: Synthetic oligonucleotide
ccccaaatagaacctaccaag

SEQ ID NO: 281 - DNA, 21 bp, Artificial Sequence
  Description of Artificial Sequence: Synthetic oligonucleotide
acttcaggtaccccaatctga

SEQ ID NO: 282 - DNA, 21 bp, Artificial Sequence
  Description of Artificial Sequence: Synthetic oligonucleotide
ctttttcacttcaggtacccc

SEQ ID NO: 283 - DNA, 21 bp, Artificial Sequence
  Description of Artificial Sequence: Synthetic oligonucleotide
tgtttgctttttcacttcagg

SEQ ID NO: 284 - DNA, 21 bp, Artificial Sequence
  Description of Artificial Sequence: Synthetic oligonucleotide
accacagtatcaatggagtga

SEQ ID NO: 285 - DNA, 21 bp, Artificial Sequence
  Description of Artificial Sequence: Synthetic oligonucleotide
tggtccgttttcaccacagta

SEQ ID NO: 286 - DNA, 21 bp, Artificial Sequence
  Description of Artificial Sequence: Synthetic oligonucleotide
aggtcaaggccttcttggctg

SEQ ID NO: 287 - DNA, 21 bp, Artificial Sequence
  Description of Artificial Sequence: Synthetic oligonucleotide
accacttcccccctcctttca

SEQ ID NO: 288 - DNA, 21 bp, Artificial Sequence
  Description of Artificial Sequence: Synthetic oligonucleotide
ctcacctgccataaatatagg

SEQ ID NO: 289 - DNA, 21 bp, Artificial Sequence
  Description of Artificial Sequence: Synthetic oligonucleotide
cagtatgagggcacctacaag

SEQ ID NO: 290 - DNA, 21 bp, Artificial Sequence
  Description of Artificial Sequence: Synthetic oligonucleotide
accccactgctgcaccagatt

SEQ ID NO: 291 - DNA, 21 bp, Artificial Sequence
  Description of Artificial Sequence: Synthetic oligonucleotide
cgccacgtaggggtgcccttc

SEQ ID NO: 292 - DNA, 21 bp, Artificial Sequence
  Description of Artificial Sequence: Synthetic oligonucleotide
gcttgtagtgccgctgctgca

SEQ ID NO: 293 - DNA, 21 bp, Artificial Sequence
  Description of Artificial Sequence: Synthetic oligonucleotide
ccgtggtgctcgaagggctct

SEQ ID NO: 294 - DNA, 21 bp, Artificial Sequence
  Description of Artificial Sequence: Synthetic oligonucleotide
ttgcagcacaagctccgggtg

SEQ ID NO: 295 - DNA, 21 bp, Artificial Sequence
  Description of Artificial Sequence: Synthetic oligonucleotide
tgcctaatttgttgcagcaca

SEQ ID NO: 296 - DNA, 21 bp, Artificial Sequence
  Description of Artificial Sequence: Synthetic oligonucleotide
tagcaagaagatccatcgcag

SEQ ID NO: 297 - DNA, 21 bp, Artificial Sequence
  Description of Artificial Sequence: Synthetic oligonucleotide
agtcttcccatgcacaagatg

SEQ ID NO: 298 - DNA, 21 bp, Artificial Sequence
  Description of Artificial Sequence: Synthetic oligonucleotide
cctttcagtcttcccatgcac

SEQ ID NO: 299 - DNA, 21 bp, Artificial Sequence
  Description of Artificial Sequence: Synthetic oligonucleotide
tccccagctgagtccagattg

SEQ ID NO: 300 - DNA, 21 bp, Artificial Sequence
  Description of Artificial Sequence: Synthetic oligonucleotide
ttcctcttagtacctttgtgt

SEQ ID NO: 301 - DNA, 21 bp, Artificial Sequence
  Description of Artificial Sequence: Synthetic oligonucleotide
gatggctcccgcaaagaaggg

SEQ ID NO: 302 - DNA, 21 bp, Artificial Sequence
  Description of Artificial Sequence: Synthetic oligonucleotide
aatcgtaggggcttcaagaag

SEQ ID NO: 303 - DNA, 21 bp, Artificial Sequence
  Description of Artificial Sequence: Synthetic oligonucleotide
ttaggaatgtgccataccgaa

SEQ ID NO: 304 - DNA, 21 bp, Artificial Sequence
  Description of Artificial Sequence: Synthetic oligonucleotide
cagatctacagacagtcaatg

SEQ ID NO: 305 - DNA, 21 bp, Artificial Sequence
  Description of Artificial Sequence: Synthetic oligonucleotide
gcaccttattcctttggccca

SEQ ID NO: 306 - DNA, 21 bp, Artificial Sequence
  Description of Artificial Sequence: Synthetic oligonucleotide
tgggatggagaacttactttt

SEQ ID NO: 307 - DNA, 21 bp, Artificial Sequence
  Description of Artificial Sequence: Synthetic oligonucleotide
atctgacgatcagcgattagt

SEQ ID NO: 308 - DNA, 21 bp, Artificial Sequence
  Description of Artificial Sequence: Synthetic oligonucleotide
actgtctttttcatattttag

SEQ ID NO: 309 - DNA, 21 bp, Artificial Sequence
  Description of Artificial Sequence: Synthetic oligonucleotide
atattttaggacccagatgat

SEQ ID NO: 310 - DNA, 21 bp, Artificial Sequence
  Description of Artificial Sequence: Synthetic oligonucleotide
ggacccagatgatgtggtacc

SEQ ID NO: 311 - DNA, 21 bp, Artificial Sequence
  Description of Artificial Sequence: Synthetic oligonucleotide
gactagcatttatgcttgcag

SEQ ID NO: 312 - DNA, 21 bp, Artificial Sequence
  Description of Artificial Sequence: Synthetic oligonucleotide
tgcttgcaggtgttattctag

SEQ ID NO: 313 - DNA, 21 bp, Artificial Sequence
  Description of Artificial Sequence: Synthetic oligonucleotide
tgaatgtaggctggaacctat

SEQ ID NO: 314 - DNA, 21 bp, Artificial Sequence
  Description of Artificial Sequence: Synthetic oligonucleotide
cctcagtcctatctgattcat

SEQ ID NO: 315 - DNA, 21 bp, Artificial Sequence
  Description of Artificial Sequence: Synthetic oligonucleotide
tttatttatcgactgtgtcat

SEQ ID NO: 316 - DNA, 21 bp, Artificial Sequence
  Description of Artificial Sequence: Synthetic oligonucleotide
tttatcgactgtgtcatgaca

SEQ ID NO: 317 - DNA, 21 bp, Artificial Sequence
  Description of Artificial Sequence: Synthetic oligonucleotide
tcgactgtgtcatgacaagga

SEQ ID NO: 318 - DNA, 21 bp, Artificial Sequence
  Description of Artificial Sequence: Synthetic oligonucleotide
cctctccaacaggtattcaga

SEQ ID NO: 319 - DNA, 21 bp, Artificial Sequence
  Description of Artificial Sequence: Synthetic oligonucleotide
gcaattcggcattttgaaaac

SEQ ID NO: 320 - DNA, 21 bp, Artificial Sequence
  Description of Artificial Sequence: Synthetic oligonucleotide
aaaacaaatttgccgtggaaa

SEQ ID NO: 321 - DNA, 21 bp, Artificial Sequence
  Description of Artificial Sequence: Synthetic oligonucleotide
ccgtggaaactttaatttgtt

SEQ ID NO: 322 - DNA, 21 bp, Artificial Sequence
  Description of Artificial Sequence: Synthetic oligonucleotide
gccaactggtaccacatcatc

SEQ ID NO: 323 - DNA, 21 bp, Artificial Sequence
  Description of Artificial Sequence: Synthetic oligonucleotide
tacaagtatgctcctcctaga

SEQ ID NO: 324 - DNA, 21 bp, Artificial Sequence
  Description of Artificial Sequence: Synthetic oligonucleotide
cacttacttgaagtgcaaaat

SEQ ID NO: 325 - DNA, 21 bp, Artificial Sequence
  Description of Artificial Sequence: Synthetic oligonucleotide
aatgcgatcagtaataaccat

SEQ ID NO: 326 - DNA, 21 bp, Artificial Sequence
  Description of Artificial Sequence: Synthetic oligonucleotide
cttgtcatgacacagtcgata

SEQ ID NO: 327 - DNA, 21 bp, Artificial Sequence
  Description of Artificial Sequence: Synthetic oligonucleotide
taagtttccttgtcatgacac

SEQ ID NO: 328 - DNA, 21 bp, Artificial Sequence
  Description of Artificial Sequence: Synthetic oligonucleotide
tctgcgttgcagtttgtaagt

SEQ ID NO: 329 - DNA, 21 bp, Artificial Sequence
  Description of Artificial Sequence: Synthetic oligonucleotide
atagtttctctgcgttgcagt

SEQ ID NO: 330 - DNA, 21 bp, Artificial Sequence
  Description of Artificial Sequence: Synthetic oligonucleotide
aaaagtattacctttaatagt

SEQ ID NO: 331 - DNA, 21 bp, Artificial Sequence
  Description of Artificial Sequence: Synthetic oligonucleotide
atatttaaaaagtattacctt

SEQ ID NO: 332 - DNA, 21 bp, Artificial Sequence
  Description of Artificial Sequence: Synthetic oligonucleotide
aaaatgccgaattgcgaaaca

SEQ ID NO: 333 - DNA, 21 bp, Artificial Sequence
  Description of Artificial Sequence: Synthetic oligonucleotide
ttttcaaaatgccgaattgcg

SEQ ID NO: 334 - DNA, 21 bp, Artificial Sequence
  Description of Artificial Sequence: Synthetic oligonucleotide
cacggcaaatttgttttcaaa

SEQ ID NO: 335 - DNA, 21 bp, Artificial Sequence
  Description of Artificial Sequence: Synthetic oligonucleotide
ttgactgttcaagaacaaatt

SEQ ID NO: 336 - DNA, 21 bp, Artificial Sequence
  Description of Artificial Sequence: Synthetic oligonucleotide
cttttctcccagctcctgccc

SEQ ID NO: 337 - DNA, 21 bp, Artificial Sequence
  Description of Artificial Sequence: Synthetic oligonucleotide
tcccagctcctgcccctccta

SEQ ID NO: 338 - DNA, 21 bp, Artificial Sequence
  Description of Artificial Sequence: Synthetic oligonucleotide
cctctcccaggcttgaccact

SEQ ID NO: 339 - DNA, 21 bp, Artificial Sequence
  Description of Artificial Sequence: Synthetic oligonucleotide
tttttcagattgggatcatct

SEQ ID NO: 340 - DNA, 21 bp, Artificial Sequence
  Description of Artificial Sequence: Synthetic oligonucleotide
taggaaggaaacttactttgt

SEQ ID NO: 341 - DNA, 21 bp, Artificial Sequence
  Description of Artificial Sequence: Synthetic oligonucleotide
gtctgggctgccaacatggta

SEQ ID NO: 342 - DNA, 21 bp, Artificial Sequence
  Description of Artificial Sequence: Synthetic oligonucleotide
tattcctgcaggcaagcaccg

SEQ ID NO: 343 - DNA, 21 bp, Artificial Sequence
  Description of Artificial Sequence: Synthetic oligonucleotide
tctgttcttctagggctacta

SEQ ID NO: 344 - DNA, 21 bp, Artificial Sequence
  Description of Artificial Sequence: Synthetic oligonucleotide
ccctctgactctctcccagtc

SEQ ID NO: 345 - DNA, 21 bp, Artificial Sequence
  Description of Artificial Sequence: Synthetic oligonucleotide
ctccttttgtaggcctatacc

SEQ ID NO: 346 - DNA, 21 bp, Artificial Sequence
  Description of Artificial Sequence: Synthetic oligonucleotide
taggcctataccattcaagga

SEQ ID NO: 347 - DNA, 21 bp, Artificial Sequence
  Description of Artificial Sequence: Synthetic oligonucleotide
ctccttgcagttgaccaagct

SEQ ID NO: 348 - DNA, 21 bp, Artificial Sequence
  Description of Artificial Sequence: Synthetic oligonucleotide
acttgtatcttaacaggcatt

SEQ ID NO: 349 - DNA, 21 bp, Artificial Sequence
  Description of Artificial Sequence: Synthetic oligonucleotide
gcaggtttggatgcatctgct

SEQ ID NO: 350 - DNA, 21 bp, Artificial Sequence
  Description of Artificial Sequence: Synthetic oligonucleotide
tttctcccttaagttgattgg

SEQ ID NO: 351 - DNA, 21 bp, Artificial Sequence
  Description of Artificial Sequence: Synthetic oligonucleotide
tcccttaagttgattggctgc

SEQ ID NO: 352 - DNA, 21 bp, Artificial Sequence
  Description of Artificial Sequence: Synthetic oligonucleotide
tgtgttacaggctttcctcgg

SEQ ID NO: 353 - DNA, 21 bp, Artificial Sequence
  Description of Artificial Sequence: Synthetic oligonucleotide
agcatgagcctgagggcttac

SEQ ID NO: 354 - DNA, 21 bp, Artificial Sequence
  Description of Artificial Sequence: Synthetic oligonucleotide
ttacctgaccacctgcaaaga

SEQ ID NO: 355 - DNA, 21 bp, Artificial Sequence
  Description of Artificial Sequence: Synthetic oligonucleotide
atcattaccccaatagccttt

SEQ ID NO: 356 - DNA, 21 bp, Artificial Sequence
  Description of Artificial Sequence: Synthetic oligonucleotide
tcttcctcagactgctgagaa

SEQ ID NO: 357 - DNA, 21 bp, Artificial Sequence
  Description of Artificial Sequence: Synthetic oligonucleotide
ctaggccgtttgagcaaggaa

SEQ ID NO: 358 - DNA, 21 bp, Artificial Sequence
  Description of Artificial Sequence: Synthetic oligonucleotide
tttcctaggccgtttgagcaa

SEQ ID NO: 359 - DNA, 21 bp, Artificial Sequence
  Description of Artificial Sequence: Synthetic oligonucleotide
atcagcactgaaaccaacctg

SEQ ID NO: 360 - DNA, 21 bp, Artificial Sequence
  Description of Artificial Sequence: Synthetic oligonucleotide
agttggctggatctattattg

SEQ ID NO: 361 - DNA, 21 bp, Artificial Sequence
  Description of Artificial Sequence: Synthetic oligonucleotide
aaaaatcttttcagttggctg

SEQ ID NO: 362 - DNA, 21 bp, Artificial Sequence
  Description of Artificial Sequence: Synthetic oligonucleotide
aatcagattattcctatgcag

SEQ ID NO: 363 - DNA, 21 bp, Artificial Sequence
  Description of Artificial Sequence: Synthetic oligonucleotide
tgtttttagggtggctccgga

SEQ ID NO: 364 - DNA, 21 bp, Artificial Sequence
  Description of Artificial Sequence: Synthetic oligonucleotide
tttctgtttttagggtggctc

SEQ ID NO: 365 - DNA, 21 bp, Artificial Sequence
  Description of Artificial Sequence: Synthetic oligonucleotide
tctctaacaggttggtttcag

SEQ ID NO: 366 - DNA, 21 bp, Artificial Sequence
  Description of Artificial Sequence: Synthetic oligonucleotide
tctcttactatagattgctta

SEQ ID NO: 367 - DNA, 21 bp, Artificial Sequence
  Description of Artificial Sequence: Synthetic oligonucleotide
cattggtttcttgaatagctt

SEQ ID NO: 368 - DNA, 21 bp, Artificial Sequence
  Description of Artificial Sequence: Synthetic oligonucleotide
ttgaatagcttctcaataggt

SEQ ID NO: 369 - DNA, 21 bp, Artificial Sequence
  Description of Artificial Sequence: Synthetic oligonucleotide
tgtagctccagctaggatgat

SEQ ID NO: 370 - DNA, 21 bp, Artificial Sequence
  Description of Artificial Sequence: Synthetic oligonucleotide
ccttaactgctctgcgcccag

SEQ ID NO: 371 - DNA, 21 bp, Artificial Sequence
  Description of Artificial Sequence: Synthetic oligonucleotide
ttaggtacacgatttttaagg

SEQ ID NO: 372 - DNA, 21 bp, Artificial Sequence
  Description of Artificial Sequence: Synthetic oligonucleotide
cttcagatgaaatccacgatg

SEQ ID NO: 373 - DNA, 21 bp, Artificial Sequence
  Description of Artificial Sequence: Synthetic oligonucleotide
gacaaggtcattgtgccctgc

SEQ ID NO: 374 - DNA, 21 bp, Artificial Sequence
  Description of Artificial Sequence: Synthetic oligonucleotide
agatgtggctggtcatggaag

SEQ ID NO: 375 - DNA, 21 bp, Artificial Sequence
  Description of Artificial Sequence: Synthetic oligonucleotide
ttgtactcgccgacggcaaag

SEQ ID NO: 376 - DNA, 21 bp, Artificial Sequence
  Description of Artificial Sequence: Synthetic oligonucleotide
cagatctacgctgtgccttgg

SEQ ID NO: 377 - DNA, 21 bp, Artificial Sequence
  Description of Artificial Sequence: Synthetic oligonucleotide
acagaaagcattctgctcttt

SEQ ID NO: 378 - DNA, 21 bp, Artificial Sequence
  Description of Artificial Sequence: Synthetic oligonucleotide
ctttcacagaaagcattctgc

SEQ ID NO: 379 - DNA, 21 bp, Artificial Sequence
  Description of Artificial Sequence: Synthetic oligonucleotide
acatgtgtagatcgtagctgg

SEQ ID NO: 380 - DNA, 21 bp, Artificial Sequence
  Description of Artificial Sequence: Synthetic oligonucleotide
ccgtcggcgagtacaacaaag

SEQ ID NO: 381 - DNA, 21 bp, Artificial Sequence
  Description of Artificial Sequence: Synthetic oligonucleotide
tcaccaagagcgagaaccctg

SEQ ID NO: 382 - DNA, 21 bp, Artificial Sequence
  Description of Artificial Sequence: Synthetic oligonucleotide
ttacagtcgtgtctgttcaaa

SEQ ID NO: 383 - DNA, 21 bp, Artificial Sequence
  Description of Artificial Sequence: Synthetic oligonucleotide
tactgtacatgcttccttttt

SEQ ID NO: 384 - DNA, 21 bp, Artificial Sequence
  Description of Artificial Sequence: Synthetic oligonucleotide
caaatgacattatctgagagc

SEQ ID NO: 385 - DNA, 21 bp, Artificial Sequence
  Description of Artificial Sequence: Synthetic oligonucleotide
ctcacgtggcacagcactccg

SEQ ID NO: 386 - DNA, 21 bp, Artificial Sequence
  Description of Artificial Sequence: Synthetic oligonucleotide
tgtgggaaccatacctttagg

SEQ ID NO: 387 - DNA, 21 bp, Artificial Sequence
  Description of Artificial Sequence: Synthetic oligonucleotide
taaaaaggaagcatgtacagt

SEQ ID NO: 388 - DNA, 21 bp, Artificial Sequence
  Description of Artificial Sequence: Synthetic oligonucleotide
tcctatggcaggtcctcatag

SEQ ID NO: 389 - DNA, 21 bp, Artificial Sequence
  Description of Artificial Sequence: Synthetic oligonucleotide
tagctggtgccgacaagaaag

SEQ ID NO: 390 - DNA, 21 bp, Artificial Sequence
  Description of Artificial Sequence: Synthetic oligonucleotide
actttctagctggtgccgaca

SEQ ID NO: 391 - DNA, 21 bp, Artificial Sequence
  Description of Artificial Sequence: Synthetic oligonucleotide
cataggtctggagggtgagcg

SEQ ID NO: 392 - DNA, 21 bp, Artificial Sequence
  Description of Artificial Sequence: Synthetic oligonucleotide
atttacataggtctggagggt

SEQ ID NO: 393 - DNA, 21 bp, Artificial Sequence
  Description of Artificial Sequence: Synthetic oligonucleotide
tgccttacagtctctcaagtc

SEQ ID NO: 394 - DNA, 21 bp, Artificial Sequence
  Description of Artificial Sequence: Synthetic oligonucleotide
ttaccagtcacaagtaataag

SEQ ID NO: 395 - DNA, 21 bp, Artificial Sequence
  Description of Artificial Sequence: Synthetic oligonucleotide
gaaatatgagattacggagca

SEQ ID NO: 396 - DNA, 21 bp, Artificial Sequence
  Description of Artificial Sequence: Synthetic oligonucleotide
tttagaaatatgagattacgg

SEQ ID NO: 397 - DNA, 21 bp, Artificial Sequence
  Description of Artificial Sequence: Synthetic oligonucleotide
tctttatttagaaatatgaga

SEQ ID NO: 398 - DNA, 21 bp, Artificial Sequence
  Description of Artificial Sequence: Synthetic oligonucleotide
attttctctttatttagaaat

SEQ ID NO: 399 - DNA, 21 bp, Artificial Sequence
  Description of Artificial Sequence: Synthetic oligonucleotide
ccccttaggacctctggtcct

SEQ ID NO: 400 - DNA, 21 bp, Artificial Sequence
  Description of Artificial Sequence: Synthetic oligonucleotide
acttacagagggtggttttcc

SEQ ID NO: 401 - DNA, 21 bp, Artificial Sequence
  Description of Artificial Sequence: Synthetic oligonucleotide
tttttaacttacagagggtgg

SEQ ID NO: 402 - DNA, 21 bp, Artificial Sequence
  Description of Artificial Sequence: Synthetic oligonucleotide
tgtaggtattggcaagcttgc

SEQ ID NO: 403 - DNA, 21 bp, Artificial Sequence
  Description of Artificial Sequence: Synthetic oligonucleotide
acactggctgcccggcaggcc

SEQ ID NO: 404 - DNA, 21 bp, Artificial Sequence
  Description of Artificial Sequence: Synthetic oligonucleotide
tgtgtaggttacgttatatat

SEQ ID NO: 405 - DNA, 21 bp, Artificial Sequence
  Description of Artificial Sequence: Synthetic oligonucleotide
ctattctaggagcgagctgga

SEQ ID NO: 406 - DNA, 21 bp, Artificial Sequence
  Description of Artificial Sequence: Synthetic oligonucleotide
cctctgcaacggactgaaggc

SEQ ID NO: 407 - DNA, 21 bp, Artificial Sequence
  Description of Artificial Sequence: Synthetic oligonucleotide
ctggccggtcacctcgaaggt

SEQ ID NO: 408 - DNA, 21 bp, Artificial Sequence
  Description of Artificial Sequence: Synthetic oligonucleotide
cctgtaggctcatgtagcctc

SEQ ID NO: 409 - DNA, 21 bp, Artificial Sequence
  Description of Artificial Sequence: Synthetic oligonucleotide
ctcagtcgccaatatgcagct

SEQ ID NO: 410 - DNA, 21 bp, Artificial Sequence
  Description of Artificial Sequence: Synthetic oligonucleotide
tttactcagtcgccaatatgc

SEQ ID NO: 411 - DNA, 21 bp, Artificial Sequence
  Description of Artificial Sequence: Synthetic oligonucleotide
ccccctagcgtctgaccaaac

SEQ ID NO: 412 - DNA, 21 bp, Artificial Sequence
  Description of Artificial Sequence: Synthetic oligonucleotide
ccccgtacgagcggcgcgcca

SEQ ID NO: 413 - DNA, 21 bp, Artificial Sequence
  Description of Artificial Sequence: Synthetic oligonucleotide
ctagtatacctcttcctcttc

SEQ ID NO: 414 - DNA, 21 bp, Artificial Sequence
  Description of Artificial Sequence: Synthetic oligonucleotide
ctcaccttggcttccccaaaa

SEQ ID NO: 415 - DNA, 21 bp, Artificial Sequence
  Description of Artificial Sequence: Synthetic oligonucleotide
aaatcttaccttccgtgcctt

SEQ ID NO: 416 - DNA, 21 bp, Artificial Sequence
  Description of Artificial Sequence: Synthetic oligonucleotide
tctgttacaggaattaacaat

SEQ ID NO: 417 - DNA, 21 bp, Artificial Sequence
  Description of Artificial Sequence: Synthetic oligonucleotide
cctctcatctctcaggtcgat

SEQ ID NO: 418 - DNA, 21 bp, Artificial Sequence
  Description of Artificial Sequence: Synthetic oligonucleotide
taccctgtagatcgaagattt

SEQ ID NO: 419 - DNA, 21 bp, Artificial Sequence
  Description of Artificial Sequence: Synthetic oligonucleotide
ggctatgtccaaactgggtct

SEQ ID NO: 420 - DNA, 21 bp, Artificial Sequence
  Description of Artificial Sequence: Synthetic oligonucleotide
tcttctttaggctatgtccaa

SEQ ID NO: 421 - DNA, 21 bp, Artificial Sequence
  Description of Artificial Sequence: Synthetic oligonucleotide
tcttcttagctggcggcagca

SEQ ID NO: 422 - DNA, 21 bp, Artificial Sequence
  Description of Artificial Sequence: Synthetic oligonucleotide
gacatcaggcttgatggtatc

SEQ ID NO: 423 - DNA, 21 bp, Artificial Sequence
  Description of Artificial Sequence: Synthetic oligonucleotide
ccatgctagatgacagaagtg

SEQ ID NO: 424 - DNA, 21 bp, Artificial Sequence
  Description of Artificial Sequence: Synthetic oligonucleotide
ttaaattcttctgccctatca

SEQ ID NO: 425 - DNA, 21 bp, Artificial Sequence
  Description of Artificial Sequence: Synthetic oligonucleotide
tcttgcagtgtgcccagctgg

SEQ ID NO: 426 - DNA, 21 bp, Artificial Sequence
  Description of Artificial Sequence: Synthetic oligonucleotide
tcattgatgataagggtattc

SEQ ID NO: 427 - DNA, 21 bp, Artificial Sequence
  Description of Artificial Sequence: Synthetic oligonucleotide
ccaggggcctttttatcattg

SEQ ID NO: 428 - DNA, 21 bp, Artificial Sequence
  Description of Artificial Sequence: Synthetic oligonucleotide
atctcttttcccaggggcctt

SEQ ID NO: 429 - DNA, 21 bp, Artificial Sequence
  Description of Artificial Sequence: Synthetic oligonucleotide
ctttcatctcttttcccaggg

SEQ ID NO: 430 - DNA, 21 bp, Artificial Sequence
  Description of Artificial Sequence: Synthetic oligonucleotide
gtatcagacccgaagcgcacc

SEQ ID NO: 431 - DNA, 21 bp, Artificial Sequence
  Description of Artificial Sequence: Synthetic oligonucleotide
ccatagggtcaatacacctaa

SEQ ID NO: 432 - DNA, 21 bp, Artificial Sequence
  Description of Artificial Sequence: Synthetic oligonucleotide
ccttttgccatagggtcaata

SEQ ID NO: 433 - DNA, 21 bp, Artificial Sequence
  Description of Artificial Sequence: Synthetic oligonucleotide
agtgatagggcagaagaattt

SEQ ID NO: 434 - DNA, 21 bp, Artificial Sequence
  Description of Artificial Sequence: Synthetic oligonucleotide
ccctcttgacttcacctttgt

SEQ ID NO: 435 - DNA, 21 bp, Artificial Sequence
  Description of Artificial Sequence: Synthetic oligonucleotide
cccccaggaaaatatgttgtg

SEQ ID NO: 436 - DNA, 21 bp, Artificial Sequence
  Description of Artificial Sequence: Synthetic oligonucleotide
ccttctcggtcacatactggc

SEQ ID NO: 437 - DNA, 21 bp, Artificial Sequence
  Description of Artificial Sequence: Synthetic oligonucleotide
gcccagtccaaggtaacttta

SEQ ID NO: 438 - DNA, 21 bp, Artificial Sequence
  Description of Artificial Sequence: Synthetic oligonucleotide
tttccatcaatttcaccgtct

SEQ ID NO: 439 - DNA, 21 bp, Artificial Sequence
  Description of Artificial Sequence: Synthetic oligonucleotide
catcaatttcaccgtcttcca

SEQ ID NO: 440 - DNA, 21 bp, Artificial Sequence
  Description of Artificial Sequence: Synthetic oligonucleotide
accgtcttccatggcctcctt

SEQ ID NO: 441 - DNA, 21 bp, Artificial Sequence
  Description of Artificial Sequence: Synthetic oligonucleotide
gcatcctcctcactgttgaag

SEQ ID NO: 442 - DNA, 21 bp, Artificial Sequence
  Description of Artificial Sequence: Synthetic oligonucleotide
gaggacccagtttcccggtca

SEQ ID NO: 443 - DNA, 21 bp, Artificial Sequence
  Description of Artificial Sequence: Synthetic oligonucleotide
ccggtcagtaactatccttgc

SEQ ID NO: 444 - DNA, 21 bp, Artificial Sequence
  Description of Artificial Sequence: Synthetic oligonucleotide
atgtctcttcagtggtatcct

SEQ ID NO: 445 - DNA, 21 bp, Artificial Sequence
  Description of Artificial Sequence: Synthetic oligonucleotide
acaaacagagttttggatggc

SEQ ID NO: 446 - DNA, 21 bp, Artificial Sequence
  Description of Artificial Sequence: Synthetic oligonucleotide
gtggcagaggccggggaggct

SEQ ID NO: 447 - DNA, 21 bp, Artificial Sequence
  Description of Artificial Sequence: Synthetic oligonucleotide
gaggacgaggtggtggtagag

SEQ ID NO: 448 - DNA, 21 bp, Artificial Sequence
  Description of Artificial Sequence: Synthetic oligonucleotide
tagacttcaacagtgaggagg

SEQ ID NO: 449 - DNA, 21 bp, Artificial Sequence
  Description of Artificial Sequence: Synthetic oligonucleotide
gttttgtagacttcaacagtg

SEQ ID NO: 450 - DNA, 21 bp, Artificial Sequence
  Description of Artificial Sequence: Synthetic oligonucleotide
gtgttctaggtttggttttgt

SEQ ID NO: 451 - DNA, 21 bp, Artificial Sequence
  Description of Artificial Sequence: Synthetic oligonucleotide
atttggtgttctaggtttggt

SEQ ID NO: 452 - DNA, 21 bp, Artificial Sequence
  Description of Artificial Sequence: Synthetic oligonucleotide
acggctccgttcgggcaagga

SEQ ID NO: 453 - DNA, 21 bp, Artificial Sequence
  Description of Artificial Sequence: Synthetic oligonucleotide
tcaaaggcctgtctgaggata

SEQ ID NO: 454 - DNA, 21 bp, Artificial Sequence
  Description of Artificial Sequence: Synthetic oligonucleotide
cttcccagagccatccaaaac

SEQ ID NO: 455 - DNA, 21 bp, Artificial Sequence
  Description of Artificial Sequence: Synthetic oligonucleotide
tagatgaaagaaacaatcatg

SEQ ID NO: 456 - DNA, 21 bp, Artificial Sequence
  Description of Artificial Sequence: Synthetic oligonucleotide
ctcttctccctgactttaggg

SEQ ID NO: 457 - DNA, 21 bp, Artificial Sequence
  Description of Artificial Sequence: Synthetic oligonucleotide
gggaactgctcgcagaaagaa

SEQ ID NO: 458 - DNA, 21 bp, Artificial Sequence
  Description of Artificial Sequence: Synthetic oligonucleotide
ttttcttaataggtgaatatg

SEQ ID NO: 459 - DNA, 21 bp, Artificial Sequence
  Description of Artificial Sequence: Synthetic oligonucleotide
ttaataggtgaatatgtttac

SEQ ID NO: 460 - DNA, 21 bp, Artificial Sequence
  Description of Artificial Sequence: Synthetic oligonucleotide
cattttcctttcatagctgtg

SEQ ID NO: 461 - DNA, 21 bp, Artificial Sequence
  Description of Artificial Sequence: Synthetic oligonucleotide
ctttcatagctgtggatggaa

SEQ ID NO: 462 - DNA, 21 bp, Artificial Sequence
  Description of Artificial Sequence: Synthetic oligonucleotide
atagctgtggatggaaaagca

SEQ ID NO: 463 - DNA, 21 bp, Artificial Sequence
  Description of Artificial Sequence: Synthetic oligonucleotide
tactcttttccttttcctaga

SEQ ID NO: 464 - DNA, 21 bp, Artificial Sequence
  Description of Artificial Sequence: Synthetic oligonucleotide
cttttcctagatcttgtggag

SEQ ID NO: 465 - DNA, 21 bp, Artificial Sequence
  Description of Artificial Sequence: Synthetic oligonucleotide
ctagatcttgtggagaatttt

SEQ ID NO: 466 - DNA, 21 bp, Artificial Sequence
  Description of Artificial Sequence: Synthetic oligonucleotide
atacttgcctcttcaatacca

SEQ ID NO: 467 - DNA, 21 bp, Artificial Sequence
  Description of Artificial Sequence: Synthetic oligonucleotide
ggggctatcattgtagtgagt

SEQ ID NO: 468 - DNA, 21 bp, Artificial Sequence
  Description of Artificial Sequence: Synthetic oligonucleotide
agcccatcaaggcagacccca

SEQ ID NO: 469 - DNA, 21 bp, Artificial Sequence
  Description of Artificial Sequence: Synthetic oligonucleotide
agttttggaactccccaaaga

SEQ ID NO: 470 - DNA, 21 bp, Artificial Sequence
  Description of Artificial Sequence: Synthetic oligonucleotide
gaactccccaaagagctgtca

SEQ ID NO: 471 - DNA, 21 bp, Artificial Sequence
  Description of Artificial Sequence: Synthetic oligonucleotide
cccctctgcttcgtctttctc

SEQ ID NO: 472 - DNA, 21 bp, Artificial Sequence
  Description of Artificial Sequence: Synthetic oligonucleotide
tccacccccgggagaccacga

SEQ ID NO: 473 - DNA, 21 bp, Artificial Sequence
  Description of Artificial Sequence: Synthetic oligonucleotide
atgtgcctgttctcaacctct

SEQ ID NO: 474 - DNA, 21 bp, Artificial Sequence
  Description of Artificial Sequence: Synthetic oligonucleotide
tgacagctctttggggagttc

SEQ ID NO: 475 - DNA, 21 bp, Artificial Sequence
  Description of Artificial Sequence: Synthetic oligonucleotide
actaagcttaattgctttctg

SEQ ID NO: 476 - DNA, 21 bp, Artificial Sequence
  Description of Artificial Sequence: Synthetic oligonucleotide
tggaacaggatctgaaactgg

SEQ ID NO: 477 - DNA, 21 bp, Artificial Sequence
  Description of Artificial Sequence: Synthetic oligonucleotide
tacccatcaacactggtaaga

SEQ ID NO: 478 - DNA, 21 bp, Artificial Sequence
  Description of Artificial Sequence: Synthetic oligonucleotide
ttcttttaggatgtggatgta

SEQ ID NO: 479 - DNA, 21 bp, Artificial Sequence
  Description of Artificial Sequence: Synthetic oligonucleotide
ggatgtggatgtagaagaggc

SEQ ID NO: 480 - DNA, 21 bp, Artificial Sequence
  Description of Artificial Sequence: Synthetic oligonucleotide
ccgccttaaatccacagcata

SEQ ID NO: 481 - DNA, 21 bp, Artificial Sequence
  Description of Artificial Sequence: Synthetic oligonucleotide
attaagttctagattttgtgc

SEQ ID NO: 482 - DNA, 21 bp, Artificial Sequence
  Description of Artificial Sequence: Synthetic oligonucleotide
tggtttcattaagttctagat

SEQ ID NO: 483 - DNA, 21 bp, Artificial Sequence
  Description of Artificial Sequence: Synthetic oligonucleotide
agatcctgttccagaaagcaa

SEQ ID NO: 484 - DNA, 21 bp, Artificial Sequence
  Description of Artificial Sequence: Synthetic oligonucleotide
aagtacctgttgggatatcca

SEQ ID NO: 485 - DNA, 21 bp, Artificial Sequence
  Description of Artificial Sequence: Synthetic oligonucleotide
tcttttaaagtacctgttggg

SEQ ID NO: 486 - DNA, 21 bp, Artificial Sequence
  Description of Artificial Sequence: Synthetic oligonucleotide
agctgatcaaggagatgttca

SEQ ID NO: 487 - DNA, 21 bp, Artificial Sequence
  Description of Artificial Sequence: Synthetic oligonucleotide
cttttcagctgatcaaggaga

SEQ ID NO: 488 - DNA, 21 bp, Artificial Sequence
  Description of Artificial Sequence: Synthetic oligonucleotide
gcatcattaacagctcaggct

SEQ ID NO: 489 - DNA, 21 bp, Artificial Sequence
  Description of Artificial Sequence: Synthetic oligonucleotide
tgaacagtttagcatcattaa

SEQ ID NO: 490 - DNA, 21 bp, Artificial Sequence
  Description of Artificial Sequence: Synthetic oligonucleotide
ttgttttctgaacagtttagc

SEQ ID NO: 491 - DNA, 21 bp, Artificial Sequence
  Description of Artificial Sequence: Synthetic oligonucleotide
ccggaattgtctcttctttgt

SEQ ID NO: 492 - DNA, 21 bp, Artificial Sequence
  Description of Artificial Sequence: Synthetic oligonucleotide
aatttaccggaattgtctctt

SEQ ID NO: 493 - DNA, 21 bp, Artificial Sequence
  Description of Artificial Sequence: Synthetic oligonucleotide
tcttttccatgtgatttttta

SEQ ID NO: 494 - DNA, 21 bp, Artificial Sequence
  Description of Artificial Sequence: Synthetic oligonucleotide
tttgtcttttccatgtgattt

SEQ ID NO: 495 - DNA, 21 bp, Artificial Sequence
  Description of Artificial Sequence: Synthetic oligonucleotide
gacctctccagtgtgttaatg

SEQ ID NO: 496 - DNA, 21 bp, Artificial Sequence
  Description of Artificial Sequence: Synthetic oligonucleotide
ttccactttagacctctccag

SEQ ID NO: 497 - DNA, 21 bp, Artificial Sequence
  Description of Artificial Sequence: Synthetic oligonucleotide
taaccaagtgctctgtagttt

SEQ ID NO: 498 - DNA, 21 bp, Artificial Sequence
  Description of Artificial Sequence: Synthetic oligonucleotide
tcttctaggtctataagaagg

SEQ ID NO: 499 - DNA, 21 bp, Artificial Sequence
  Description of Artificial Sequence: Synthetic oligonucleotide
agtaagtgttcacttacgttc

SEQ ID NO: 500 - DNA, 21 bp, Artificial Sequence
  Description of Artificial Sequence: Synthetic oligonucleotide
ccttaattcttgcttctcaga

SEQ ID NO: 501 - DNA, 21 bp, Artificial Sequence
  Description of Artificial Sequence: Synthetic oligonucleotide
agctgagcaatggacgtggac

SEQ ID NO: 502 - DNA, 21 bp, Artificial Sequence
  Description of Artificial Sequence: Synthetic oligonucleotide
aaggacttaaaggagaagaag

SEQ ID NO: 503 - DNA, 21 bp, Artificial Sequence
  Description of Artificial Sequence: Synthetic oligonucleotide
tgtcgaggagaatgaggaaaa

SEQ ID NO: 504 - DNA, 21 bp, Artificial Sequence
  Description of Artificial Sequence: Synthetic oligonucleotide
attctctccaggtgaggaaga

SEQ ID NO: 505 - DNA, 21 bp, Artificial Sequence
  Description of Artificial Sequence: Synthetic oligonucleotide
tctgcttaggatgacgatgtc

SEQ ID NO: 506 - DNA, 21 bp, Artificial Sequence
  Description of Artificial Sequence: Synthetic oligonucleotide
gcatccggagaaatgaaaaga

SEQ ID NO: 507 - DNA, 21 bp, Artificial Sequence
  Description of Artificial Sequence: Synthetic oligonucleotide
tccacaggtgcgggagtatga

SEQ ID NO: 508 - DNA, 21 bp, Artificial Sequence
  Description of Artificial Sequence: Synthetic oligonucleotide
agcatcgcagacaagaagcgc

SEQ ID NO: 509 - DNA, 21 bp, Artificial Sequence
  Description of Artificial Sequence: Synthetic oligonucleotide
agtatgatgggatcatccttc

SEQ ID NO: 510 - DNA, 21 bp, Artificial Sequence
  Description of Artificial Sequence: Synthetic oligonucleotide
cggatgcgaagttcccgcatg

SEQ ID NO: 511 - DNA, 21 bp, Artificial Sequence
  Description of Artificial Sequence: Synthetic oligonucleotide
tccggatgccaaaggatctga

SEQ ID NO: 512 - DNA, 21 bp, Artificial Sequence
  Description of Artificial Sequence: Synthetic oligonucleotide
atttctccggatgccaaagga

SEQ ID NO: 513 - DNA, 21 bp, Artificial Sequence
  Description of Artificial Sequence: Synthetic oligonucleotide
gacccttctccaagatttctt

SEQ ID NO: 514 - DNA, 21 bp, Artificial Sequence
  Description of Artificial Sequence: Synthetic oligonucleotide
ttaactcatactcccgcacct

SEQ ID NO: 515 - DNA, 21 bp, Artificial Sequence
  Description of Artificial Sequence: Synthetic oligonucleotide
ccttctgctggaaccagcgca

SEQ ID NO: 516 - DNA, 21 bp, Artificial Sequence
  Description of Artificial Sequence: Synthetic oligonucleotide
tctttttttccaacagaattt

SEQ ID NO: 517 - DNA, 21 bp, Artificial Sequence
  Description of Artificial Sequence: Synthetic oligonucleotide
caacagaatttgccattttca

SEQ ID NO: 518 - DNA, 21 bp, Artificial Sequence
  Description of Artificial Sequence: Synthetic oligonucleotide
ttgaggccctcagcactagtt

SEQ ID NO: 519 - DNA, 21 bp, Artificial Sequence
  Description of Artificial Sequence: Synthetic oligonucleotide
cggccagcaggggcatctctg

SEQ ID NO: 520 - DNA, 21 bp, Artificial Sequence
  Description of Artificial Sequence: Synthetic oligonucleotide
tgggttacttacattcatggc

SEQ ID NO: 521 - DNA, 21 bp, Artificial Sequence
  Description of Artificial Sequence: Synthetic oligonucleotide
tctgcctgcagcctgtggagc

SEQ ID NO: 522 - DNA, 21 bp, Artificial Sequence
  Description of Artificial Sequence: Synthetic oligonucleotide
ttctccctacctagccctgga

SEQ ID NO: 523 - DNA, 21 bp, Artificial Sequence
  Description of Artificial Sequence: Synthetic oligonucleotide
cattgctccttagatccacat

SEQ ID NO: 524 - DNA, 21 bp, Artificial Sequence
  Description of Artificial Sequence: Synthetic oligonucleotide
cctccccaaaaggaagagttc

SEQ ID NO: 525 - DNA, 21 bp, Artificial Sequence
  Description of Artificial Sequence: Synthetic oligonucleotide
ctgcggtaatcatgaggataa

SEQ ID NO: 526 - DNA, 21 bp, Artificial Sequence
  Description of Artificial Sequence: Synthetic oligonucleotide
agttctgggaaaatggtgtgc

SEQ ID NO: 527 - DNA, 21 bp, Artificial Sequence
  Description of Artificial Sequence: Synthetic oligonucleotide
ctttccctagtgaagaacagt

SEQ ID NO: 528 - DNA, 21 bp, Artificial Sequence
  Description of Artificial Sequence: Synthetic oligonucleotide
cctagtgaagaacagtccaga

SEQ ID NO: 529 - DNA, 21 bp, Artificial Sequence
  Description of Artificial Sequence: Synthetic oligonucleotide
cagctaagttcttggacttca

SEQ ID NO: 530 - DNA, 21 bp, Artificial Sequence
  Description of Artificial Sequence: Synthetic oligonucleotide
ctataaggttagaaggccttg

SEQ ID NO: 531 - DNA, 21 bp, Artificial Sequence
  Description of Artificial Sequence: Synthetic oligonucleotide
caattttccttctagttatga

SEQ ID NO: 532 - DNA, 21 bp, Artificial Sequence
  Description of Artificial Sequence: Synthetic oligonucleotide
cttctagttatgagccagagt

SEQ ID NO: 533 - DNA, 21 bp, Artificial Sequence
  Description of Artificial Sequence: Synthetic oligonucleotide
ctggtttaatctacagaatga

SEQ ID NO: 534 - DNA, 21 bp, Artificial Sequence
  Description of Artificial Sequence: Synthetic oligonucleotide
atctacagaatgatcaaaccc

SEQ ID NO: 535 - DNA, 21 bp, Artificial Sequence
  Description of Artificial Sequence: Synthetic oligonucleotide
tttctggaaaagttgtattaa

SEQ ID NO: 536 - DNA, 21 bp, Artificial Sequence
  Description of Artificial Sequence: Synthetic oligonucleotide
tggaaaagttgtattaacagg

SEQ ID NO: 537 - DNA, 21 bp, Artificial Sequence
  Description of Artificial Sequence: Synthetic oligonucleotide
ggtcaagtttacaaccaagat

SEQ ID NO: 538 - DNA, 21 bp, Artificial Sequence
  Description of Artificial Sequence: Synthetic oligonucleotide
gggcacgaagtgcaatggtct

SEQ ID NO: 539 - DNA, 21 bp, Artificial Sequence
  Description of Artificial Sequence: Synthetic oligonucleotide
ccagaactgaaaatcagtgcc

SEQ ID NO: 540 - DNA, 21 bp, Artificial Sequence
  Description of Artificial Sequence: Synthetic oligonucleotide
ttacggctacctcttggctcc

SEQ ID NO: 541 - DNA, 21 bp, Artificial Sequence
  Description of Artificial Sequence: Synthetic oligonucleotide
ttgctgccagtctggactgtt

SEQ ID NO: 542 - DNA, 21 bp, Artificial Sequence
  Description of Artificial Sequence: Synthetic oligonucleotide
agacttacctactaaattgtt

SEQ ID NO: 543 - DNA, 21 bp, Artificial Sequence
  Description of Artificial Sequence: Synthetic oligonucleotide
atcattctgtagattaaacca

SEQ ID NO: 544 - DNA, 21 bp, Artificial Sequence
  Description of Artificial Sequence: Synthetic oligonucleotide
cagaaacaaaaataaggagaa

SEQ ID NO: 545 - DNA, 21 bp, Artificial Sequence
  Description of Artificial Sequence: Synthetic oligonucleotide
aaatgcttcataaatttctgc

SEQ ID NO: 546 - DNA, 21 bp, Artificial Sequence
  Description of Artificial Sequence: Synthetic oligonucleotide
ctcagccagcccccaatcttc

SEQ ID NO: 547 - DNA, 21 bp, Artificial Sequence
  Description of Artificial Sequence: Synthetic oligonucleotide
tcccaatctgtgtagttagca

SEQ ID NO: 548 - DNA, 21 bp, Artificial Sequence
  Description of Artificial Sequence: Synthetic oligonucleotide
gggtaattctccatctgctgc

SEQ ID NO: 549 - DNA, 21 bp, Artificial Sequence
  Description of Artificial Sequence: Synthetic oligonucleotide
ggaattgtctttgcctgctgc

SEQ ID NO: 550 - DNA, 21 bp, Artificial Sequence
  Description of Artificial Sequence: Synthetic oligonucleotide
cttctaggttttgggaattgt

SEQ ID NO: 551 - DNA, 21 bp, Artificial Sequence
  Description of Artificial Sequence: Synthetic oligonucleotide
tgcctgccaccttcagggctg

SEQ ID NO: 552 - DNA, 21 bp, Artificial Sequence
  Description of Artificial Sequence: Synthetic oligonucleotide
aacgagaaggcgatccataag

SEQ ID NO: 553 - DNA, 21 bp, Artificial Sequence
  Description of Artificial Sequence: Synthetic oligonucleotide
agtgctgtggggctgctaact

SEQ ID NO: 554 - DNA, 21 bp, Artificial Sequence
  Description of Artificial Sequence: Synthetic oligonucleotide
ttccctcccccagtttaagtg

SEQ ID NO: 555 - DNA, 21 bp, Artificial Sequence
  Description of Artificial Sequence: Synthetic oligonucleotide
ataacaacttccggcagcaga

SEQ ID NO: 556 - DNA, 21 bp, Artificial Sequence
  Description of Artificial Sequence: Synthetic oligonucleotide
tgtctcttatcatgttggtgg

SEQ ID NO: 557 - DNA, 21 bp, Artificial Sequence
  Description of Artificial Sequence: Synthetic oligonucleotide
ccatctttctgtctcttatca

SEQ ID NO: 558 - DNA, 21 bp, Artificial Sequence
  Description of Artificial Sequence: Synthetic oligonucleotide
ctcctgcagtttgccatcttt

SEQ ID NO: 559 - DNA, 21 bp, Artificial Sequence
  Description of Artificial Sequence: Synthetic oligonucleotide
tgggctgctgcggggcctgca

SEQ ID NO: 560 - DNA, 21 bp, Artificial Sequence
  Description of Artificial Sequence: Synthetic oligonucleotide
tgttttcagaacgacaccgta

SEQ ID NO: 561 - DNA, 21 bp, Artificial Sequence
  Description of Artificial Sequence: Synthetic oligonucleotide
agaacgacaccgtaactatcc

SEQ ID NO: 562 - DNA, 21 bp, Artificial Sequence
  Description of Artificial Sequence: Synthetic oligonucleotide
ggtcattgatgtccttcaccc

SEQ ID NO: 563 - DNA, 21 bp, Artificial Sequence
  Description of Artificial Sequence: Synthetic oligonucleotide
tcattcagcatggcctgtatg

SEQ ID NO: 564 - DNA, 21 bp, Artificial Sequence
  Description of Artificial Sequence: Synthetic oligonucleotide
cctcttcttctggattacaga

SEQ ID NO: 565 - DNA, 21 bp, Artificial Sequence
  Description of Artificial Sequence: Synthetic oligonucleotide
tagtgcggatagttacggtgt

SEQ ID NO: 566 - DNA, 21 bp, Artificial Sequence
  Description of Artificial Sequence: Synthetic oligonucleotide
cttaatgaactataccttttt

SEQ ID NO: 567 - DNA, 21 bp, Artificial Sequence
  Description of Artificial Sequence: Synthetic oligonucleotide
gggctgtgcccaaatgagctt

SEQ ID NO: 568 - DNA, 21 bp, Artificial Sequence
  Description of Artificial Sequence: Synthetic oligonucleotide
ttccaggaaaatgatgaagtt

SEQ ID NO: 569 - DNA, 21 bp, Artificial Sequence
  Description of Artificial Sequence: Synthetic oligonucleotide
tacccaatgacggttgcttga

SEQ ID NO: 570 - DNA, 21 bp, Artificial Sequence
  Description of Artificial Sequence: Synthetic oligonucleotide
agaggagttgaagccaaacag

SEQ ID NO: 571 - DNA, 21 bp, Artificial Sequence
  Description of Artificial Sequence: Synthetic oligonucleotide
tatttcagaggagttgaagcc

SEQ ID NO: 572 - DNA, 21 bp, Artificial Sequence
  Description of Artificial Sequence: Synthetic oligonucleotide
ggcaagtgtcgtggacttcgt

SEQ ID NO: 573 - DNA, 21 bp, Artificial Sequence
  Description of Artificial Sequence: Synthetic oligonucleotide
atttttaggcaagtgtcgtgg

SEQ ID NO: 574 - DNA, 21 bp, Artificial Sequence
  Description of Artificial Sequence: Synthetic oligonucleotide
tccaggaagttgtccagggca

SEQ ID NO: 575 - DNA, 21 bp, Artificial Sequence
  Description of Artificial Sequence: Synthetic oligonucleotide
aggcccttgcgcttgcgggtc

SEQ ID NO: 576 - DNA, 21 bp, Artificial Sequence
  Description of Artificial Sequence: Synthetic oligonucleotide
accactggcagatcctgcccg

SEQ ID NO: 577 - DNA, 21 bp, Artificial Sequence
  Description of Artificial Sequence: Synthetic oligonucleotide
tggtcaaggcctatctgcccg

SEQ ID NO: 578 - DNA, 21 bp, Artificial Sequence
  Description of Artificial Sequence: Synthetic oligonucleotide
aacaggaagcggggccacgtg

SEQ ID NO: 579 - DNA, 21 bp, Artificial Sequence
  Description of Artificial Sequence: Synthetic oligonucleotide
ccttctggcagtgtccagagc

SEQ ID NO: 580 - DNA, 21 bp, Artificial Sequence
  Description of Artificial Sequence: Synthetic oligonucleotide
tttcccttctggcagtgtcca

SEQ ID NO: 581 - DNA, 21 bp, Artificial Sequence
  Description of Artificial Sequence: Synthetic oligonucleotide
cttctcccttctgcagggtga

SEQ ID NO: 582 - DNA, 21 bp, Artificial Sequence
  Description of Artificial Sequence: Synthetic oligonucleotide
gcgtgctgggcctggacctct

SEQ ID NO: 583 - DNA, 21 bp, Artificial Sequence
  Description of Artificial Sequence: Synthetic oligonucleotide
acaacttcctcatcaccaacg

SEQ ID NO: 584 - DNA, 21 bp, Artificial Sequence
  Description of Artificial Sequence: Synthetic oligonucleotide
gcaacgagacgtggggcgtaa

SEQ ID NO: 585 - DNA, 21 bp, Artificial Sequence
  Description of Artificial Sequence: Synthetic oligonucleotide
tgggtggatccaagtgccctt

SEQ ID NO: 586 - DNA, 21 bp, Artificial Sequence
  Description of Artificial Sequence: Synthetic oligonucleotide
ctccaagtctcacctgccaga

SEQ ID NO: 587 - DNA, 21 bp, Artificial Sequence
  Description of Artificial Sequence: Synthetic oligonucleotide
ttacgccccacgtctcgttgc

SEQ ID NO: 588 - DNA, 21 bp, Artificial Sequence
  Description of Artificial Sequence: Synthetic oligonucleotide
tccttcatttgtttctctgct

SEQ ID NO: 589 - DNA, 21 bp, Artificial Sequence
  Description of Artificial Sequence: Synthetic oligonucleotide
ttgtcttcttcctcctcctta

SEQ ID NO: 590 - DNA, 21 bp, Artificial Sequence
  Description of Artificial Sequence: Synthetic oligonucleotide
tcctcatcatcctccttgtcc

SEQ ID NO: 591 - DNA, 21 bp, Artificial Sequence
  Description of Artificial Sequence: Synthetic oligonucleotide
tatgcccagggaaggaggcgc

SEQ ID NO: 592 - DNA, 21 bp, Artificial Sequence
  Description of Artificial Sequence: Synthetic oligonucleotide
aggcttattcaaacctcctta

SEQ ID NO: 593 - DNA, 21 bp, Artificial Sequence
  Description of Artificial Sequence: Synthetic oligonucleotide
aggtgagctccaaggaagtga

SEQ ID NO: 594 - DNA, 21 bp, Artificial Sequence
  Description of Artificial Sequence: Synthetic oligonucleotide
cttctttttcaggtgagctcc

SEQ ID NO: 595 - DNA, 21 bp, Artificial Sequence
  Description of Artificial Sequence: Synthetic oligonucleotide
cttcagatgacggtcgaacca

SEQ ID NO: 596 - DNA, 21 bp, Artificial Sequence
  Description of Artificial Sequence: Synthetic oligonucleotide
cagaagtgccggacgtcgggc

SEQ ID NO: 597 - DNA, 21 bp, Artificial Sequence
  Description of Artificial Sequence: Synthetic oligonucleotide
cagttcctgacggagctgacc

SEQ ID NO: 598 - DNA, 21 bp, Artificial Sequence
  Description of Artificial Sequence: Synthetic oligonucleotide
tttcggatcttctcgccctca

SEQ ID NO: 599 - DNA, 21 bp, Artificial Sequence
  Description of Artificial Sequence: Synthetic oligonucleotide
ggatcttctcgccctcagagc

SEQ ID NO: 600 - DNA, 21 bp, Artificial Sequence
  Description of Artificial Sequence: Synthetic oligonucleotide
tctacattgcctacagtgacg

SEQ ID NO: 601 - DNA, 21 bp, Artificial Sequence
  Description of Artificial Sequence: Synthetic oligonucleotide
atcccaggaacaccatgaaga

SEQ ID NO: 602 - DNA, 21 bp, Artificial Sequence
  Description of Artificial Sequence: Synthetic oligonucleotide
tgctttcatcccaggaacacc

SEQ ID NO: 603 - DNA, 21 bp, Artificial Sequence
  Description of Artificial Sequence: Synthetic oligonucleotide
tcaacaatgtcattccaccca

SEQ ID NO: 604 - DNA, 21 bp, Artificial Sequence
  Description of Artificial Sequence: Synthetic oligonucleotide
tttgtcaacaatgtcattcca

SEQ ID NO: 605 - DNA, 21 bp, Artificial Sequence
  Description of Artificial Sequence: Synthetic oligonucleotide
cagttggtcagttctacttct

SEQ ID NO: 606 - DNA, 21 bp, Artificial Sequence
  Description of Artificial Sequence: Synthetic oligonucleotide
ttgcatcttgtatcttttgca

SEQ ID NO: 607 - DNA, 21 bp, Artificial Sequence
  Description of Artificial Sequence: Synthetic oligonucleotide
tcaggtgatagtagaaaaggc

SEQ ID NO: 608 - DNA, 21 bp, Artificial Sequence
  Description of Artificial Sequence: Synthetic oligonucleotide
atctctttatcaggtgatagt

SEQ ID NO: 609 - DNA, 21 bp, Artificial Sequence
  Description of Artificial Sequence: Synthetic oligonucleotide
ataatctgccactcttggcag

SEQ ID NO: 610 - DNA, 21 bp, Artificial Sequence
  Description of Artificial Sequence: Synthetic oligonucleotide
taacccagattgaaaaagaag

SEQ ID NO: 611 - DNA, 21 bp, Artificial Sequence
  Description of Artificial Sequence: Synthetic oligonucleotide
gtattctcttaacagaagact

SEQ ID NO: 612 - DNA, 21 bp, Artificial Sequence
  Description of Artificial Sequence: Synthetic oligonucleotide
gagaagcttacctcttcagga

SEQ ID NO: 613 - DNA, 21 bp, Artificial Sequence
  Description of Artificial Sequence: Synthetic oligonucleotide
aattatttattacagtatttt

SEQ ID NO: 614 - DNA, 21 bp, Artificial Sequence
  Description of Artificial Sequence: Synthetic oligonucleotide
ttacagtattttgatgaaaat

SEQ ID NO: 615 - DNA, 21 bp, Artificial Sequence
  Description of Artificial Sequence: Synthetic oligonucleotide
ggatttgacgaaacgttcgag

SEQ ID NO: 616 - DNA, 21 bp, Artificial Sequence
  Description of Artificial Sequence: Synthetic oligonucleotide
acgaaacgttcgagtcaaacg

SEQ ID NO: 617 - DNA, 21 bp, Artificial Sequence
  Description of Artificial Sequence: Synthetic oligonucleotide
aggttcccgatatggatgatg

SEQ ID NO: 618 - DNA, 21 bp, Artificial Sequence
  Description of Artificial Sequence: Synthetic oligonucleotide
tttcaggaggatgaaggagaa

SEQ ID NO: 619 - DNA, 21 bp, Artificial Sequence
  Description of Artificial Sequence: Synthetic oligonucleotide
aggaggatgaaggagaagatg

SEQ ID NO: 620 - DNA, 21 bp, Artificial Sequence
  Description of Artificial Sequence: Synthetic oligonucleotide
ttttacctctccttcctcccc

SEQ ID NO: 621 - DNA, 21 bp, Artificial Sequence
  Description of Artificial Sequence: Synthetic oligonucleotide
gccaaattttcttttacctct

SEQ ID NO: 622 - DNA, 21 bp, Artificial Sequence
  Description of Artificial Sequence: Synthetic oligonucleotide
cagaccacagtccatgccatc

SEQ ID NO: 623 - DNA, 21 bp, Artificial Sequence
  Description of Artificial Sequence: Synthetic oligonucleotide
atcttctaggtatgacaacga

SEQ ID NO: 624 - DNA, 21 bp, Artificial Sequence
  Description of Artificial Sequence: Synthetic oligonucleotide
tttgttgtaggaggataagat

SEQ ID NO: 625 - DNA, 21 bp, Artificial Sequence
  Description of Artificial Sequence: Synthetic oligonucleotide
ttgtaggaggataagatcaat

SEQ ID NO: 626 - DNA, 21 bp, Artificial Sequence
  Description of Artificial Sequence: Synthetic oligonucleotide
tagctgaggagaagaaagtgg

SEQ ID NO: 627 - DNA, 21 bp, Artificial Sequence
  Description of Artificial Sequence: Synthetic oligonucleotide
ccaccatcaccttacctttgc

SEQ ID NO: 628 - DNA, 21 bp, Artificial Sequence
  Description of Artificial Sequence: Synthetic oligonucleotide
ctacctggagcagcagcagtg

SEQ ID NO: 629 - DNA, 21 bp, Artificial Sequence
  Description of Artificial Sequence: Synthetic oligonucleotide
ctcttaaggggcgcagactcg

SEQ ID NO: 630 - DNA, 21 bp, Artificial Sequence
  Description of Artificial Sequence: Synthetic oligonucleotide
tagggatcaagcatgaattgc

SEQ ID NO: 631 - DNA, 21 bp, Artificial Sequence
  Description of Artificial Sequence: Synthetic oligonucleotide
ttctttatagggatcaagcat

SEQ ID NO: 632 - DNA, 21 bp, Artificial Sequence
  Description of Artificial Sequence: Synthetic oligonucleotide
tgtccagggcccccgagtctg

SEQ ID NO: 633 - DNA, 21 bp, Artificial Sequence
  Description of Artificial Sequence: Synthetic oligonucleotide
ctcttggtctcccgcagcccg

SEQ ID NO: 634 - DNA, 21 bp, Artificial Sequence
  Description of Artificial Sequence: Synthetic oligonucleotide
cattatttattttaacccact

SEQ ID NO: 635 - DNA, 21 bp, Artificial Sequence
  Description of Artificial Sequence: Synthetic oligonucleotide
ttttaacccacttccttgtac

SEQ ID NO: 636 - DNA, 21 bp, Artificial Sequence
  Description of Artificial Sequence: Synthetic oligonucleotide
acccacttccttgtacttaca

SEQ ID NO: 637 - DNA, 21 bp, Artificial Sequence
  Description of Artificial Sequence: Synthetic oligonucleotide
cctggtagtttttgaaattag

SEQ ID NO: 638 - DNA, 21 bp, Artificial Sequence
  Description of Artificial Sequence: Synthetic oligonucleotide
gaaatggaaaaatgtgtaagt

SEQ ID NO: 639 - DNA, 21 bp, Artificial Sequence
  Description of Artificial Sequence: Synthetic oligonucleotide
cttcccaagttctttattggt

SEQ ID NO: 640 - DNA, 21 bp, Artificial Sequence
  Description of Artificial Sequence: Synthetic oligonucleotide
tttgcttcccaagttctttat

SEQ ID NO: 641 - DNA, 21 bp, Artificial Sequence
  Description of Artificial Sequence: Synthetic oligonucleotide
gaatcaaagggaaacttgaag

SEQ ID NO: 642 - DNA, 21 bp, Artificial Sequence
  Description of Artificial Sequence: Synthetic oligonucleotide
ttaatgcagatggtcagtagg

SEQ ID NO: 643 - DNA, 21 bp, Artificial Sequence
  Description of Artificial Sequence: Synthetic oligonucleotide
ctacctttcatctcgccttta

SEQ ID NO: 644 - DNA, 21 bp, Artificial Sequence
  Description of Artificial Sequence: Synthetic oligonucleotide
ttgttcactatgactcctgca

SEQ ID NO: 645 - DNA, 21 bp, Artificial Sequence
  Description of Artificial Sequence: Synthetic oligonucleotide
ctcacccttttttctgagctc

SEQ ID NO: 646 - DNA, 21 bp, Artificial Sequence
  Description of Artificial Sequence: Synthetic oligonucleotide
atgcaggttctgccattacag

SEQ ID NO: 647 - DNA, 21 bp, Artificial Sequence
  Description of Artificial Sequence: Synthetic oligonucleotide
tttttttaatgcaggttctgc

SEQ ID NO: 648 - DNA, 21 bp, Artificial Sequence
  Description of Artificial Sequence: Synthetic oligonucleotide
ttctctcagtacatccagcag

SEQ ID NO: 649 - DNA, 21 bp, Artificial Sequence
  Description of Artificial Sequence: Synthetic oligonucleotide
actttctaggtcccgaacccc

SEQ ID NO: 650 - DNA, 21 bp, Artificial Sequence
  Description of Artificial Sequence: Synthetic oligonucleotide
taggtcccgaacccctggtaa

SEQ ID NO: 651 - DNA, 21 bp, Artificial Sequence
  Description of Artificial Sequence: Synthetic oligonucleotide
ttatgcaggttcgtgctgtaa

SEQ ID NO: 652 - DNA, 21 bp, Artificial Sequence
  Description of Artificial Sequence: Synthetic oligonucleotide
gtattttcctttctaggatca

SEQ ID NO: 653 - DNA, 21 bp, Artificial Sequence
  Description of Artificial Sequence: Synthetic oligonucleotide
ctttctaggatcaagcgtgct

SEQ ID NO: 654 - DNA, 21 bp, Artificial Sequence
  Description of Artificial Sequence: Synthetic oligonucleotide
taggatcaagcgtgctttcct

SEQ ID NO: 655 - DNA, 21 bp, Artificial Sequence
  Description of Artificial Sequence: Synthetic oligonucleotide
agaaatacttacagcctagtt

SEQ ID NO: 656 - DNA, 21 bp, Artificial Sequence
  Description of Artificial Sequence: Synthetic oligonucleotide
acttacctgtcacgaacacat

SEQ ID NO: 657 - DNA, 21 bp, Artificial Sequence
  Description of Artificial Sequence: Synthetic oligonucleotide
agcatttaacttacctgtcac

SEQ ID NO: 658 - DNA, 21 bp, Artificial Sequence
  Description of Artificial Sequence: Synthetic oligonucleotide
tctttcagaatgttggctacc

SEQ ID NO: 659 - DNA, 21 bp, Artificial Sequence
  Description of Artificial Sequence: Synthetic oligonucleotide
agaatgttggctaccagggta

SEQ ID NO: 660 - DNA, 21 bp, Artificial Sequence
  Description of Artificial Sequence: Synthetic oligonucleotide
cacctctgtgtgtgtacgagc

SEQ ID NO: 661 - DNA, 21 bp, Artificial Sequence
  Description of Artificial Sequence: Synthetic oligonucleotide
ttcaatatgtttttcagaaag

SEQ ID NO: 662 - DNA, 21 bp, Artificial Sequence
  Description of Artificial Sequence: Synthetic oligonucleotide
agaaagtgttgtgaagagcga

SEQ ID NO: 663 - DNA, 21 bp, Artificial Sequence
  Description of Artificial Sequence: Synthetic oligonucleotide
gctcccagcttatatggatcg

SEQ ID NO: 664 - DNA, 21 bp, Artificial Sequence
  Description of Artificial Sequence: Synthetic oligonucleotide
ctgagatgaacaggggctcga

SEQ ID NO: 665 - DNA, 21 bp, Artificial Sequence
  Description of Artificial Sequence: Synthetic oligonucleotide
accgcgctcgttatcatgtgg

SEQ ID NO: 666 - DNA, 21 bp, Artificial Sequence
  Description of Artificial Sequence: Synthetic oligonucleotide
acaaagagtgggtggccaagc

SEQ ID NO: 667 - DNA, 21 bp, Artificial Sequence
  Description of Artificial Sequence: Synthetic oligonucleotide
tcaaagctttgcgggaggggg

SEQ ID NO: 668 - DNA, 21 bp, Artificial Sequence
  Description of Artificial Sequence: Synthetic oligonucleotide
gtagtcccacttggaggctaa

SEQ ID NO: 669 - DNA, 21 bp, Artificial Sequence
  Description of Artificial Sequence: Synthetic oligonucleotide
tccttgctctctgcagaaatg

SEQ ID NO: 670 - DNA, 21 bp, Artificial Sequence
  Description of Artificial Sequence: Synthetic oligonucleotide
gaacattgatgatggcacctc

SEQ ID NO: 671 - DNA, 21 bp, Artificial Sequence
  Description of Artificial Sequence: Synthetic oligonucleotide
tccccaggtactctgtggata

SEQ ID NO: 672 - DNA, 21 bp, Artificial Sequence
  Description of Artificial Sequence: Synthetic oligonucleotide
ccttctagatacaagacaggc

SEQ ID NO: 673 - DNA, 21 bp, Artificial Sequence
  Description of Artificial Sequence: Synthetic oligonucleotide
cgtccggagtagcgtccagcc

SEQ ID NO: 674 - DNA, 21 bp, Artificial Sequence
  Description of Artificial Sequence: Synthetic oligonucleotide
tctttgatctcttggcgatct

SEQ ID NO: 675 - DNA, 21 bp, Artificial Sequence
  Description of Artificial Sequence: Synthetic oligonucleotide
acaaaagattttatctttgat

SEQ ID NO: 676 - DNA, 21 bp, Artificial Sequence
  Description of Artificial Sequence: Synthetic oligonucleotide
gaggctttgtgttcatttcgc

SEQ ID NO: 677 - DNA, 21 bp, Artificial Sequence
  Description of Artificial Sequence: Synthetic oligonucleotide
tgttcatttcgccctaggccc

SEQ ID NO: 678 - DNA, 21 bp, Artificial Sequence
  Description of Artificial Sequence: Synthetic oligonucleotide
gccctaggccccttctcgatg

SEQ ID NO: 679 - DNA, 21 bp, Artificial Sequence
  Description of Artificial Sequence: Synthetic oligonucleotide
caatgtcctttccccggagct

SEQ ID NO: 680 - DNA, 21 bp, Artificial Sequence
  Description of Artificial Sequence: Synthetic oligonucleotide
ccaagcacctggttattgggt

SEQ ID NO: 681 - DNA, 21 bp, Artificial Sequence
  Description of Artificial Sequence: Synthetic oligonucleotide
ttggaagtctccacatcttct

SEQ ID NO: 682 - DNA, 21 bp, Artificial Sequence
  Description of Artificial Sequence: Synthetic oligonucleotide
gcctgggcggccgtagggccc

SEQ ID NO: 683 - DNA, 21 bp, Artificial Sequence
  Description of Artificial Sequence: Synthetic oligonucleotide
aggcctcaagctccggggaaa

SEQ ID NO: 684 - DNA, 21 bp, Artificial Sequence
  Description of Artificial Sequence: Synthetic oligonucleotide
gaaaatcaatgagaagccaca

SEQ ID NO: 685 - DNA, 21 bp, Artificial Sequence
  Description of Artificial Sequence: Synthetic oligonucleotide
cctcacaccgactccaggggc

SEQ ID NO: 686 - DNA, 21 bp, Artificial Sequence
  Description of Artificial Sequence: Synthetic oligonucleotide
taggctatcttagcggcacag

SEQ ID NO: 687 - DNA, 21 bp, Artificial Sequence
  Description of Artificial Sequence: Synthetic oligonucleotide
taattttctaggctatcttag

SEQ ID NO: 688 - DNA, 21 bp, Artificial Sequence
  Description of Artificial Sequence: Synthetic oligonucleotide
aaagaaaaatgcttaaatttc

SEQ ID NO: 689 - DNA, 21 bp, Artificial Sequence
  Description of Artificial Sequence: Synthetic oligonucleotide
agaatgagcaagattcacttt

SEQ ID NO: 690 - DNA, 21 bp, Artificial Sequence
  Description of Artificial Sequence: Synthetic oligonucleotide
taggtagaggccctgcttctt

SEQ ID NO: 691 - DNA, 21 bp, Artificial Sequence
  Description of Artificial Sequence: Synthetic oligonucleotide
gatctaacaaccacaagagaa

SEQ ID NO: 692 - DNA, 21 bp, Artificial Sequence
  Description of Artificial Sequence: Synthetic oligonucleotide
gcttttgttcattcataaact

SEQ ID NO: 693 - DNA, 21 bp, Artificial Sequence
  Description of Artificial Sequence: Synthetic oligonucleotide
ttcattcataaactccaagtc

SEQ ID NO: 694 - DNA, 21 bp, Artificial Sequence
  Description of Artificial Sequence: Synthetic oligonucleotide
cctcagagggaacatactgct

SEQ ID NO: 695 - DNA, 21 bp, Artificial Sequence
  Description of Artificial Sequence: Synthetic oligonucleotide
tccatcttcaagaaaattcct

SEQ ID NO: 696 - DNA, 21 bp, Artificial Sequence
  Description of Artificial Sequence: Synthetic oligonucleotide
cttagagatgattctctcaaa

SEQ ID NO: 697 - DNA, 21 bp, Artificial Sequence
  Description of Artificial Sequence: Synthetic oligonucleotide
taggctcctgctccaaatgtg

SEQ ID NO: 698 - DNA, 21 bp, Artificial Sequence
  Description of Artificial Sequence: Synthetic oligonucleotide
cgtcatcggcttgaagataaa

SEQ ID NO: 699 - DNA, 21 bp, Artificial Sequence
  Description of Artificial Sequence: Synthetic oligonucleotide
tgaatgaacaaaagctaaaca

SEQ ID NO: 700 - DNA, 21 bp, Artificial Sequence
  Description of Artificial Sequence: Synthetic oligonucleotide
cagaagctgagtatctatggt

SEQ ID NO: 701 - DNA, 21 bp, Artificial Sequence
  Description of Artificial Sequence: Synthetic oligonucleotide
ttttgcagaagctgagtatct

SEQ ID NO: 702 - DNA, 21 bp, Artificial Sequence
  Description of Artificial Sequence: Synthetic oligonucleotide
ttgtgcaactgttgctacagc

SEQ ID NO: 703 - DNA, 21 bp, Artificial Sequence
  Description of Artificial Sequence: Synthetic oligonucleotide
gatttgttgtgcaactgttgc

SEQ ID NO: 704 - DNA, 21 bp, Artificial Sequence
  Description of Artificial Sequence: Synthetic oligonucleotide
actacaactcttgtcctctcg

SEQ ID NO: 705 - DNA, 21 bp, Artificial Sequence
  Description of Artificial Sequence: Synthetic oligonucleotide
cagtaactctgggtggatttt

SEQ ID NO: 706 - DNA, 21 bp, Artificial Sequence
  Description of Artificial Sequence: Synthetic oligonucleotide
ttgaagatggagaaagtgatg

SEQ ID NO: 707 - DNA, 21 bp, Artificial Sequence
  Description of Artificial Sequence: Synthetic oligonucleotide
agcagatctgcaaatgagaaa

SEQ ID NO: 708 - DNA, 21 bp, Artificial Sequence
  Description of Artificial Sequence: Synthetic oligonucleotide
agagaatcatctctaagcaaa

SEQ ID NO: 709 - DNA, 21 bp, Artificial Sequence
  Description of Artificial Sequence: Synthetic oligonucleotide
gagcaggagcctacaaatttg

SEQ ID NO: 710 - DNA, 21 bp, Artificial Sequence
  Description of Artificial Sequence: Synthetic oligonucleotide
gtctaagccagaaatccagta

SEQ ID NO: 711 - DNA, 21 bp, Artificial Sequence
  Description of Artificial Sequence: Synthetic oligonucleotide
attattattttagtctaagcc

SEQ ID NO: 712 - DNA, 21 bp, Artificial Sequence
  Description of Artificial Sequence: Synthetic oligonucleotide
tcttcaagccgatgacggaaa

SEQ ID NO: 713 - DNA, 21 bp, Artificial Sequence
  Description of Artificial Sequence: Synthetic oligonucleotide
tcttttccaggaatttgacaa

SEQ ID NO: 714 - DNA, 21 bp, Artificial Sequence
  Description of Artificial Sequence: Synthetic oligonucleotide
caggaatttgacaagaagtac

SEQ ID NO: 715 - DNA, 21 bp, Artificial Sequence
  Description of Artificial Sequence: Synthetic oligonucleotide
atgtgtcacataactaccgaa

SEQ ID NO: 716 - DNA, 21 bp, Artificial Sequence
  Description of Artificial Sequence: Synthetic oligonucleotide
tttcttaggaacatcattcat

SEQ ID NO: 717 - DNA, 21 bp, Artificial Sequence
  Description of Artificial Sequence: Synthetic oligonucleotide
ttaggaacatcattcatggca

SEQ ID NO: 718 - DNA, 21 bp, Artificial Sequence
  Description of Artificial Sequence: Synthetic oligonucleotide
gctgatggcaacacctcatag

SEQ ID NO: 719 - DNA, 21 bp, Artificial Sequence
  Description of Artificial Sequence: Synthetic oligonucleotide
tgttttctaggagttggcctg

SEQ ID NO: 720 - DNA, 21 bp, Artificial Sequence
  Description of Artificial Sequence: Synthetic oligonucleotide
taggagttggcctgggccctg

SEQ ID NO: 721 - DNA, 21 bp, Artificial Sequence
  Description of Artificial Sequence: Synthetic oligonucleotide
tattgctgtcaaccccaggta

SEQ ID NO: 722 - DNA, 21 bp, Artificial Sequence
  Description of Artificial Sequence: Synthetic oligonucleotide
taacagcatccttcccactgc

SEQ ID NO: 723 - DNA, 21 bp, Artificial Sequence
  Description of Artificial Sequence: Synthetic oligonucleotide
atgggcacggcaatgatcttt

SEQ ID NO: 724 - DNA, 21 bp, Artificial Sequence
  Description of Artificial Sequence: Synthetic oligonucleotide
cctgcttcaccctcagtgcac

SEQ ID NO: 725 - DNA, 21 bp, Artificial Sequence
  Description of Artificial Sequence: Synthetic oligonucleotide
ctgtgtcttataggtatcttg

SEQ ID NO: 726 - DNA, 21 bp, Artificial Sequence
  Description of Artificial Sequence: Synthetic oligonucleotide
tcttccctggggaatgttttc

SEQ ID NO: 727 - DNA, 21 bp, Artificial Sequence
  Description of Artificial Sequence: Synthetic oligonucleotide
gatccatttggcttttccagg

SEQ ID NO: 728 - DNA, 21 bp, Artificial Sequence
  Description of Artificial Sequence: Synthetic oligonucleotide
ttaggcaaacctgtatgtggg

SEQ ID NO: 729 - DNA, 21 bp, Artificial Sequence
  Description of Artificial Sequence: Synthetic oligonucleotide
atactcaactcattattgaaa

SEQ ID NO: 730 - DNA, 21 bp, Artificial Sequence
  Description of Artificial Sequence: Synthetic oligonucleotide
aggcactgcattgatctcttc

SEQ ID NO: 731 - DNA, 21 bp, Artificial Sequence
  Description of Artificial Sequence: Synthetic oligonucleotide
attactgtcttcagaaaactc

SEQ ID NO: 732 - DNA, 21 bp, Artificial Sequence
  Description of Artificial Sequence: Synthetic oligonucleotide
tccatttctaggataagaaga

SEQ ID NO: 733 - DNA, 21 bp, Artificial Sequence
  Description of Artificial Sequence: Synthetic oligonucleotide
taggataagaagaaagagaag

SEQ ID NO: 734 - DNA, 21 bp, Artificial Sequence
  Description of Artificial Sequence: Synthetic oligonucleotide
atggctatgaggtgttgccat

SEQ ID NO: 735 - DNA, 21 bp, Artificial Sequence
  Description of Artificial Sequence: Synthetic oligonucleotide
tgttcagtttcatggctatga

SEQ ID NO: 736 - DNA, 21 bp, Artificial Sequence
  Description of Artificial Sequence: Synthetic oligonucleotide
ccagttcacacttacctccca

SEQ ID NO: 737 - DNA, 21 bp, Artificial Sequence
  Description of Artificial Sequence: Synthetic oligonucleotide
aataatgagttgagtatcaaa

SEQ ID NO: 738 - DNA, 21 bp, Artificial Sequence
  Description of Artificial Sequence: Synthetic oligonucleotide
tgaagacagtaatgaaatcta

SEQ ID NO: 739 - DNA, 21 bp, Artificial Sequence
  Description of Artificial Sequence: Synthetic oligonucleotide
attcatggccaggatcatcat

SEQ ID NO: 740 - DNA, 21 bp, Artificial Sequence
  Description of Artificial Sequence: Synthetic oligonucleotide
ggttgtaggctaactaacctt

SEQ ID NO: 741 - DNA, 21 bp, Artificial Sequence
  Description of Artificial Sequence: Synthetic oligonucleotide
tttaggaaattgaagttggtg

SEQ ID NO: 742 - DNA, 21 bp, Artificial Sequence
  Description of Artificial Sequence: Synthetic oligonucleotide
ggaaattgaagttggtggtgg

SEQ ID NO: 743 - DNA, 21 bp, Artificial Sequence
  Description of Artificial Sequence: Synthetic oligonucleotide
ccttacagaggagaattctgc

SEQ ID NO: 744 - DNA, 21 bp, Artificial Sequence
  Description of Artificial Sequence: Synthetic oligonucleotide
aactattcttttagccgtact

SEQ ID NO: 745 - DNA, 21 bp, Artificial Sequence
  Description of Artificial Sequence: Synthetic oligonucleotide
gccgtactctgacagctgtgc

SEQ ID NO: 746 - DNA, 21 bp, Artificial Sequence
  Description of Artificial Sequence: Synthetic oligonucleotide
ttttcttgtaggttgaaactt

SEQ ID NO: 747 - DNA, 21 bp, Artificial Sequence
  Description of Artificial Sequence: Synthetic oligonucleotide
ttgtaggttgaaactttttct

SEQ ID NO: 748 - DNA, 21 bp, Artificial Sequence
  Description of Artificial Sequence: Synthetic oligonucleotide
tgaaactactaaaatactcac

SEQ ID NO: 749 - DNA, 21 bp, Artificial Sequence
  Description of Artificial Sequence: Synthetic oligonucleotide
cttcccagggcgtgatggtgg

SEQ ID NO: 750 - DNA, 21 bp, Artificial Sequence
  Description of Artificial Sequence: Synthetic oligonucleotide
atttgtagtgatgatgatgat

SEQ ID NO: 751 - DNA, 21 bp, Artificial Sequence
  Description of Artificial Sequence: Synthetic oligonucleotide
taattgcagtctatacgagat

SEQ ID NO: 752 - DNA, 21 bp, Artificial Sequence
  Description of Artificial Sequence: Synthetic oligonucleotide
gaaattcatttctttttcagg

SEQ ID NO: 753 - DNA, 21 bp, Artificial Sequence
  Description of Artificial Sequence: Synthetic oligonucleotide
tttttcagggacaagaatcct

SEQ ID NO: 754 - DNA, 21 bp, Artificial Sequence
  Description of Artificial Sequence: Synthetic oligonucleotide
agggacaagaatccttcaaga

SEQ ID NO: 755 - DNA, 21 bp, Artificial Sequence
  Description of Artificial Sequence: Synthetic oligonucleotide
tcttaatagggtggttctctt

SEQ ID NO: 756 - DNA, 21 bp, Artificial Sequence
  Description of Artificial Sequence: Synthetic oligonucleotide
caggctattcaagatctctgg

SEQ ID NO: 757 - DNA, 21 bp, Artificial Sequence
  Description of Artificial Sequence: Synthetic oligonucleotide
taaaatcatacttactcttca

SEQ ID NO: 758 - DNA, 21 bp, Artificial Sequence
  Description of Artificial Sequence: Synthetic oligonucleotide
ctcactttttctatacttgct

SEQ ID NO: 759 - DNA, 21 bp, Artificial Sequence
  Description of Artificial Sequence: Synthetic oligonucleotide
tttttcttggtacgctgcttc

SEQ ID NO: 760 - DNA, 21 bp, Artificial Sequence
  Description of Artificial Sequence: Synthetic oligonucleotide
gggcccaggcggcgaggcact

SEQ ID NO: 761 - DNA, 21 bp, Artificial Sequence
  Description of Artificial Sequence: Synthetic oligonucleotide
ggaggctaaggagaagcgcca

SEQ ID NO: 762 - DNA, 21 bp, Artificial Sequence
  Description of Artificial Sequence: Synthetic oligonucleotide
tttaggaggctaaggagaagc

SEQ ID NO: 763 - DNA, 21 bp, Artificial Sequence
  Description of Artificial Sequence: Synthetic oligonucleotide
ttttgtttaggaggctaagga

SEQ ID NO: 764 - DNA, 21 bp, Artificial Sequence
  Description of Artificial Sequence: Synthetic oligonucleotide
ggtaagaaacctaggaccaaa

SEQ ID NO: 765 - DNA, 21 bp, Artificial Sequence
  Description of Artificial Sequence: Synthetic oligonucleotide
aatttttaggtaagaaaccta

SEQ ID NO: 766 - DNA, 21 bp, Artificial Sequence
  Description of Artificial Sequence: Synthetic oligonucleotide
ttctaaggagagaaggatatt

SEQ ID NO: 767 - DNA, 21 bp, Artificial Sequence
  Description of Artificial Sequence: Synthetic oligonucleotide
cttaaaggaaccattaaagag

SEQ ID NO: 768 - DNA, 21 bp, Artificial Sequence
  Description of Artificial Sequence: Synthetic oligonucleotide
tttacttaaaggaaccattaa

SEQ ID NO: 769 - DNA, 21 bp, Artificial Sequence
  Description of Artificial Sequence: Synthetic oligonucleotide
ctcttctgcagttaaacacag

SEQ ID NO: 770 - DNA, 21 bp, Artificial Sequence
  Description of Artificial Sequence: Synthetic oligonucleotide
ctgtttcctcttctgcagtta

SEQ ID NO: 771 - DNA, 21 bp, Artificial Sequence
  Description of Artificial Sequence: Synthetic oligonucleotide
tagtctccaaaaaaagttggt

SEQ ID NO: 772 - DNA, 21 bp, Artificial Sequence
  Description of Artificial Sequence: Synthetic oligonucleotide
tttctagtctccaaaaaaagt

SEQ ID NO: 773 - DNA, 21 bp, Artificial Sequence
  Description of Artificial Sequence: Synthetic oligonucleotide
ccccagtatacctgaggtgca

SEQ ID NO: 774 - DNA, 21 bp, Artificial Sequence
  Description of Artificial Sequence: Synthetic oligonucleotide
aacctgttacccacagaccct

SEQ ID NO: 775 - DNA, 21 bp, Artificial Sequence
  Description of Artificial Sequence: Synthetic oligonucleotide
gcattgacacatgtcgcagca

SEQ ID NO: 776 - DNA, 21 bp, Artificial Sequence
  Description of Artificial Sequence: Synthetic oligonucleotide
aggaattcaagtacttgtgga

SEQ ID NO: 777 - DNA, 21 bp, Artificial Sequence
  Description of Artificial Sequence: Synthetic oligonucleotide
cagtagtgaactcccaggtgc

SEQ ID NO: 778 - DNA, 21 bp, Artificial Sequence
  Description of Artificial Sequence: Synthetic oligonucleotide
atgttgttccacaagtacttg

SEQ ID NO: 779 - DNA, 21 bp, Artificial Sequence
  Description of Artificial Sequence: Synthetic oligonucleotide
tacacacctgccaccttttga

SEQ ID NO: 780 - DNA, 21 bp, Artificial Sequence
  Description of Artificial Sequence: Synthetic oligonucleotide
agaggtttctacacacctgcc

SEQ ID NO: 781 - DNA, 21 bp, Artificial Sequence
  Description of Artificial Sequence: Synthetic oligonucleotide
atctgagtagcgtcggatgat

SEQ ID NO: 782 - DNA, 21 bp, Artificial Sequence
  Description of Artificial Sequence: Synthetic oligonucleotide
tcaagagatttgaaggcacct

SEQ ID NO: 783 - DNA, 21 bp, Artificial Sequence
  Description of Artificial Sequence: Synthetic oligonucleotide
tccagtgccatctttgtcaag

SEQ ID NO: 784 - DNA, 21 bp, Artificial Sequence
  Description of Artificial Sequence: Synthetic oligonucleotide
cagggtggctttgtccactat

SEQ ID NO: 785 - DNA, 21 bp, Artificial Sequence
  Description of Artificial Sequence: Synthetic oligonucleotide
tttattagcttacctttctgt

SEQ ID NO: 786 - DNA, 21 bp, Artificial Sequence
  Description of Artificial Sequence: Synthetic oligonucleotide
ttagcttacctttctgttcct

SEQ ID NO: 787 - DNA, 21 bp, Artificial Sequence
  Description of Artificial Sequence: Synthetic oligonucleotide
agtgaatcatctacagcctct

SEQ ID NO: 788 - DNA, 21 bp, Artificial Sequence
  Description of Artificial Sequence: Synthetic oligonucleotide
tttttcagtgaatcatctaca

SEQ ID NO: 789 - DNA, 21 bp, Artificial Sequence
  Description of Artificial Sequence: Synthetic oligonucleotide
cccttttttctttttcagtga

SEQ ID NO: 790 - DNA, 21 bp, Artificial Sequence
  Description of Artificial Sequence: Synthetic oligonucleotide
aggtgtaatcctgagagattc

SEQ ID NO: 791 - DNA, 21 bp, Artificial Sequence
  Description of Artificial Sequence: Synthetic oligonucleotide
tattccataacagtggttgaa

SEQ ID NO: 792 - DNA, 21 bp, Artificial Sequence
  Description of Artificial Sequence: Synthetic oligonucleotide
tccacagctccgctagcaatc

SEQ ID NO: 793 - DNA, 21 bp, Artificial Sequence
  Description of Artificial Sequence: Synthetic oligonucleotide
tgacccttcttctctttctag

SEQ ID NO: 794 - DNA, 21 bp, Artificial Sequence
  Description of Artificial Sequence: Synthetic oligonucleotide
taggttgacaaggtcacaggc

SEQ ID NO: 795 - DNA, 21 bp, Artificial Sequence
  Description of Artificial Sequence: Synthetic oligonucleotide
ttaagggtgagtcagatgatt

SEQ ID NO: 796 - DNA, 21 bp, Artificial Sequence
  Description of Artificial Sequence: Synthetic oligonucleotide
ccctggttctaggaacttttg

SEQ ID NO: 797 - DNA, 21 bp, Artificial Sequence
  Description of Artificial Sequence: Synthetic oligonucleotide
agacgatgccatcggccttgg

SEQ ID NO: 798 - DNA, 21 bp, Artificial Sequence
  Description of Artificial Sequence: Synthetic oligonucleotide
attttctttccttaggcggta

SEQ ID NO: 799 - DNA, 21 bp, Artificial Sequence
  Description of Artificial Sequence: Synthetic oligonucleotide
tttccttaggcggtaaccagc

SEQ ID NO: 800 - DNA, 21 bp, Artificial Sequence
  Description of Artificial Sequence: Synthetic oligonucleotide
cttaggcggtaaccagcgtga

SEQ ID NO: 801 - DNA, 21 bp, Artificial Sequence
  Description of Artificial Sequence: Synthetic oligonucleotide
tgctgccgcccgcaagcagag

SEQ ID NO: 802 - DNA, 21 bp, Artificial Sequence
  Description of Artificial Sequence: Synthetic oligonucleotide
atattcttctggcgggcgagc

SEQ ID NO: 803 - DNA, 21 bp, Artificial Sequence
  Description of Artificial Sequence: Synthetic oligonucleotide
ccttaaccgagtcgctctgct

SEQ ID NO: 804 - DNA, 21 bp, Artificial Sequence
  Description of Artificial Sequence: Synthetic oligonucleotide
cctcccctccctggggctacc

SEQ ID NO: 805 - DNA, 21 bp, Artificial Sequence
  Description of Artificial Sequence: Synthetic oligonucleotide
tttcccctcctgccttttagg

SEQ ID NO: 806 - DNA, 21 bp, Artificial Sequence
  Description of Artificial Sequence: Synthetic oligonucleotide
ccctcctgccttttagggaag

SEQ ID NO: 807 - DNA, 21 bp, Artificial Sequence
  Description of Artificial Sequence: Synthetic oligonucleotide
gggaagacaaaggcgctttgg

SEQ ID NO: 808 - DNA, 21 bp, Artificial Sequence
  Description of Artificial Sequence: Synthetic oligonucleotide
tcttttcagatccgccgtcac

SEQ ID NO: 809 - DNA, 21 bp, Artificial Sequence
  Description of Artificial Sequence: Synthetic oligonucleotide
agatccgccgtcactggggtg

SEQ ID NO: 810 - DNA, 21 bp, Artificial Sequence
  Description of Artificial Sequence: Synthetic oligonucleotide
gggccaggctgtgtacttacg

SEQ ID NO: 811 - DNA, 21 bp, Artificial Sequence
  Description of Artificial Sequence: Synthetic oligonucleotide
gtgtaaagctgcctcttacct

SEQ ID NO: 812 - DNA, 21 bp, Artificial Sequence
  Description of Artificial Sequence: Synthetic oligonucleotide
taaattacctccaccatatgg

SEQ ID NO: 813 - DNA, 21 bp, Artificial Sequence
  Description of Artificial Sequence: Synthetic oligonucleotide
cactcttcattggaccgtagt

SEQ ID NO: 814 - DNA, 21 bp, Artificial Sequence
  Description of Artificial Sequence: Synthetic oligonucleotide
caaaatcattgtaatttccac

SEQ ID NO: 815 - DNA, 21 bp, Artificial Sequence
  Description of Artificial Sequence: Synthetic oligonucleotide
ttacctcctccatagttgtca

SEQ ID NO: 816 - DNA, 21 bp, Artificial Sequence
  Description of Artificial Sequence: Synthetic oligonucleotide
caccgccaccacgtgaatccc

SEQ ID NO: 817 - DNA, 21 bp, Artificial Sequence
  Description of Artificial Sequence: Synthetic oligonucleotide
gtggtagcaggaacatggggg

SEQ ID NO: 818 - DNA, 21 bp, Artificial Sequence
  Description of Artificial Sequence: Synthetic oligonucleotide
gaaattataaccagcaacctt

SEQ ID NO: 819 - DNA, 21 bp, Artificial Sequence
  Description of Artificial Sequence: Synthetic oligonucleotide
ataggaaattatggaagtgga

SEQ ID NO: 820 - DNA, 21 bp, Artificial Sequence
  Description of Artificial Sequence: Synthetic oligonucleotide
gaggtagccccggttatggag

SEQ ID NO: 821 - DNA, 21 bp, Artificial Sequence
  Description of Artificial Sequence: Synthetic oligonucleotide
taataggtggcaattttggag

SEQ ID NO: 822 - DNA, 21 bp, Artificial Sequence
  Description of Artificial Sequence: Synthetic oligonucleotide
gggatggctataatgggtatg

SEQ ID NO: 823 - DNA, 21 bp, Artificial Sequence
  Description of Artificial Sequence: Synthetic oligonucleotide
gcccctaacagatggatatgg

SEQ ID NO: 824 - DNA, 21 bp, Artificial Sequence
  Description of Artificial Sequence: Synthetic oligonucleotide
ggaccaggaccaggaagtaac

SEQ ID NO: 825 - DNA, 21 bp, Artificial Sequence
  Description of Artificial Sequence: Synthetic oligonucleotide
gggattcacgtggtggcggtg

SEQ ID NO: 826 - DNA, 21 bp, Artificial Sequence
  Description of Artificial Sequence: Synthetic oligonucleotide
gctttggggattcacgtggtg

SEQ ID NO: 827 - DNA, 21 bp, Artificial Sequence
  Description of Artificial Sequence: Synthetic oligonucleotide
ttgtaggcaactttggctttg

SEQ ID NO: 828 - DNA, 21 bp, Artificial Sequence
  Description of Artificial Sequence: Synthetic oligonucleotide
tctagacaagaaatgcaggaa

SEQ ID NO: 829 - DNA, 21 bp, Artificial Sequence
  Description of Artificial Sequence: Synthetic oligonucleotide
tctaacagaaaaagcggatgg

SEQ ID NO: 830 - DNA, 21 bp, Artificial Sequence
  Description of Artificial Sequence: Synthetic oligonucleotide
gcatagctcaccttgtcgtag

SEQ ID NO: 831 - DNA, 21 bp, Artificial Sequence
  Description of Artificial Sequence: Synthetic oligonucleotide
agcaggaggcagttgcaggac

SEQ ID NO: 832 - DNA, 21 bp, Artificial Sequence
  Description of Artificial Sequence: Synthetic oligonucleotide
tccttcccaagaattgaagag

SEQ ID NO: 833 - DNA, 21 bp, Artificial Sequence
  Description of Artificial Sequence: Synthetic oligonucleotide
cctttctccttcccaagaatt

SEQ ID NO: 834 - DNA, 21 bp, Artificial Sequence
  Description of Artificial Sequence: Synthetic oligonucleotide
tcctagatcaagactggtgcc

SEQ ID NO: 835 - DNA, 21 bp, Artificial Sequence
  Description of Artificial Sequence: Synthetic oligonucleotide
ttttctcctagatcaagactg

SEQ ID NO: 836 - DNA, 21 bp, Artificial Sequence
  Description of Artificial Sequence: Synthetic oligonucleotide
cttagtggtgtctatcgaaga

SEQ ID NO: 837 - DNA, 21 bp, Artificial Sequence
  Description of Artificial Sequence: Synthetic oligonucleotide
ctatatgttgacagggtggtg

SEQ ID NO: 838 - DNA, 21 bp, Artificial Sequence
  Description of Artificial Sequence: Synthetic oligonucleotide
aaggttggatggcaagcatgt

SEQ ID NO: 839 - DNA, 21 bp, Artificial Sequence
  Description of Artificial Sequence: Synthetic oligonucleotide
cctgtgaggtggccgccggca

SEQ ID NO: 840 - DNA, 21 bp, Artificial Sequence
  Description of Artificial Sequence: Synthetic oligonucleotide
accacctcagtgctcaagaac

SEQ ID NO: 841 - DNA, 21 bp, Artificial Sequence
  Description of Artificial Sequence: Synthetic oligonucleotide
tgtccctcgggcagcaacatc

SEQ ID NO: 842 - DNA, 21 bp, Artificial Sequence
  Description of Artificial Sequence: Synthetic oligonucleotide
ttgacaatgcgcccctcaggc

SEQ ID NO: 843 - DNA, 21 bp, Artificial Sequence
  Description of Artificial Sequence: Synthetic oligonucleotide
tagccgagtcgtccggaaatc

SEQ ID NO: 844 - DNA, 21 bp, Artificial Sequence
  Description of Artificial Sequence: Synthetic oligonucleotide
ttctgtgggttgatctgtatt

SEQ ID NO: 845 - DNA, 21 bp, Artificial Sequence
  Description of Artificial Sequence: Synthetic oligonucleotide
ccagcaccatcctgcaccttg

SEQ ID NO: 846 - DNA, 21 bp, Artificial Sequence
  Description of Artificial Sequence: Synthetic oligonucleotide
tctttgccagcaccatcctgc

SEQ ID NO: 847 - DNA, 21 bp, Artificial Sequence
  Description of Artificial Sequence: Synthetic oligonucleotide
ctgattttctctttgccagca

SEQ ID NO: 848 - DNA, 21 bp, Artificial Sequence
  Description of Artificial Sequence: Synthetic oligonucleotide
caaggcatctccccagagcga

SEQ ID NO: 849 - DNA, 21 bp, Artificial Sequence
  Description of Artificial Sequence: Synthetic oligonucleotide
cctgagaatacagatcaaccc

SEQ ID NO: 850 - DNA, 21 bp, Artificial Sequence
  Description of Artificial Sequence: Synthetic oligonucleotide
cttcttgtgcagtttgcctga

SEQ ID NO: 851 - DNA, 21 bp, Artificial Sequence
  Description of Artificial Sequence: Synthetic oligonucleotide
tgttttgcttcttgtgcagtt

SEQ ID NO: 852 - DNA, 21 bp, Artificial Sequence
  Description of Artificial Sequence: Synthetic oligonucleotide
tctcgggcttcatctcttgtg

SEQ ID NO: 853 - DNA, 21 bp, Artificial Sequence
  Description of Artificial Sequence: Synthetic oligonucleotide
gcggttcttagaagagtactt

SEQ ID NO: 854 - DNA, 21 bp, Artificial Sequence
  Description of Artificial Sequence: Synthetic oligonucleotide
tgaagaccctcactggcaaaa

SEQ ID NO: 855 - DNA, 21 bp, Artificial Sequence
  Description of Artificial Sequence: Synthetic oligonucleotide
ccagtgagggtcttcacaaag

SEQ ID NO: 856 - DNA, 21 bp, Artificial Sequence
  Description of Artificial Sequence: Synthetic oligonucleotide
tgggcaagctggcggagagaa

SEQ ID NO: 857 - DNA, 21 bp, Artificial Sequence
  Description of Artificial Sequence: Synthetic oligonucleotide
accttcttcttgggacgcagg

SEQ ID NO: 858 - DNA, 21 bp, Artificial Sequence
  Description of Artificial Sequence: Synthetic oligonucleotide
taggtgaaaaggtttactttt

SEQ ID NO: 859 - DNA, 21 bp, Artificial Sequence
  Description of Artificial Sequence: Synthetic oligonucleotide
tgatttaaaaagcatacctgg

SEQ ID NO: 860 - DNA, 21 bp, Artificial Sequence
  Description of Artificial Sequence: Synthetic oligonucleotide
aaaagcatacctggatcaatg

SEQ ID NO: 861 - DNA, 21 bp, Artificial Sequence
  Description of Artificial Sequence: Synthetic oligonucleotide
ggtgactctgacatcattaga

SEQ ID NO: 862 - DNA, 21 bp, Artificial Sequence
  Description of Artificial Sequence: Synthetic oligonucleotide
ttttttaggtgactctgacat

SEQ ID NO: 863 - DNA, 21 bp, Artificial Sequence
  Description of Artificial Sequence: Synthetic oligonucleotide
tttttattttttaggtgactc

SEQ ID NO: 864 - DNA, 21 bp, Artificial Sequence
  Description of Artificial Sequence: Synthetic oligonucleotide
gttcccaaaggaaatctgaaa

SEQ ID NO: 865 - DNA, 21 bp, Artificial Sequence
  Description of Artificial Sequence: Synthetic oligonucleotide
cccattttggttcccaaagga

SEQ ID NO: 866 - DNA, 21 bp, Artificial Sequence
  Description of Artificial Sequence: Synthetic oligonucleotide
tagaaaaagtcgctggagtcg

SEQ ID NO: 867 - DNA, 21 bp, Artificial Sequence
  Description of Artificial Sequence: Synthetic oligonucleotide
ctttgtagaaaaagtcgctgg

SEQ ID NO: 868 - DNA, 21 bp, Artificial Sequence
  Description of Artificial Sequence: Synthetic oligonucleotide
atgtttgctttgtagaaaaag

SEQ ID NO: 869 - DNA, 21 bp, Artificial Sequence
  Description of Artificial Sequence: Synthetic oligonucleotide
cgcctgccgcccccggatggg

SEQ ID NO: 870 - DNA, 21 bp, Artificial Sequence
  Description of Artificial Sequence: Synthetic oligonucleotide
tcccaccgctttccgagcccg

SEQ ID NO: 871 - DNA, 21 bp, Artificial Sequence
  Description of Artificial Sequence: Synthetic oligonucleotide
cgagcccgcttgcacctcggc

SEQ ID NO: 872 - DNA, 21 bp, Artificial Sequence
  Description of Artificial Sequence: Synthetic oligonucleotide
tggcgtcgctcctgtgctgtg

SEQ ID NO: 873 - DNA, 21 bp, Artificial Sequence
  Description of Artificial Sequence: Synthetic oligonucleotide
tgttgcagcctcggaaaattg

SEQ ID NO: 874 - DNA, 21 bp, Artificial Sequence
  Description of Artificial Sequence: Synthetic oligonucleotide
tctctttccctctaggtttgg

SEQ ID NO: 875 - DNA, 21 bp, Artificial Sequence
  Description of Artificial Sequence: Synthetic oligonucleotide
cctctaggtttggcagtgaag

SEQ ID NO: 876 - DNA, 21 bp, Artificial Sequence
  Description of Artificial Sequence: Synthetic oligonucleotide
gtcgggctgtgagcaggaagt

SEQ ID NO: 877 - DNA, 21 bp, Artificial Sequence
  Description of Artificial Sequence: Synthetic oligonucleotide
ttctttctattgtcttccagg

SEQ ID NO: 878 - DNA, 21 bp, Artificial Sequence
  Description of Artificial Sequence: Synthetic oligonucleotide
tattgtcttccaggcaccatt

SEQ ID NO: 879 - DNA, 21 bp, Artificial Sequence
  Description of Artificial Sequence: Synthetic oligonucleotide
gctaaagttctttcagtcatc

SEQ ID NO: 880 - DNA, 21 bp, Artificial Sequence
  Description of Artificial Sequence: Synthetic oligonucleotide
cccatcagcaggactagcgct

SEQ ID NO: 881 - DNA, 21 bp, Artificial Sequence
  Description of Artificial Sequence: Synthetic oligonucleotide
ctcctcctccagcgctagtcc

SEQ ID NO: 882 - DNA, 21 bp, Artificial Sequence
  Description of Artificial Sequence: Synthetic oligonucleotide
tctttcctcctcctccagcgc

SEQ ID NO: 883 - DNA, 21 bp, Artificial Sequence
  Description of Artificial Sequence: Synthetic oligonucleotide
gcatggatcttcgtaccaaga

SEQ ID NO: 884 - DNA, 21 bp, Artificial Sequence
  Description of Artificial Sequence: Synthetic oligonucleotide
tcctcataatctgtagactga

SEQ ID NO: 885 - DNA, 21 bp, Artificial Sequence
  Description of Artificial Sequence: Synthetic oligonucleotide
tctttcctatcctttcaggct

SEQ ID NO: 886 - DNA, 21 bp, Artificial Sequence
  Description of Artificial Sequence: Synthetic oligonucleotide
ctatcctttcaggctattgag

SEQ ID NO: 887 - DNA, 21 bp, Artificial Sequence
  Description of Artificial Sequence: Synthetic oligonucleotide
aggctattgagggcacctaca

SEQ ID NO: 888 - DNA, 21 bp, Artificial Sequence
  Description of Artificial Sequence: Synthetic oligonucleotide
ttctgaggttccccgcacctc

SEQ ID NO: 889 - DNA, 23 bp, Artificial Sequence
  Description of Artificial Sequence: Synthetic oligonucleotide
cccagctctcataccatgagtcc

SEQ ID NO: 890 - DNA, 23 bp, Artificial Sequence
  Description of Artificial Sequence: Synthetic oligonucleotide
tatccacagtgaatcttggttgt

SEQ ID NO: 891 - DNA, 23 bp, Artificial Sequence
  Description of Artificial Sequence: Synthetic oligonucleotide
cacttcgtgcccgaaacgccgaa

SEQ ID NO: 892 - DNA, 23 bp, Artificial Sequence
  Description of Artificial Sequence: Synthetic oligonucleotide
tctctgaccattgtagcggtttg

SEQ ID NO: 893 - DNA, 23 bp, Artificial Sequence
  Description of Artificial Sequence: Synthetic oligonucleotide
tagcggtttgctgcggtaatcat

SEQ ID NO: 894 - DNA, 23 bp, Artificial Sequence
  Description of Artificial Sequence: Synthetic oligonucleotide
tcagttctgggaaaatggtgtgc

SEQ ID NO: 895 - DNA, 23 bp, Artificial Sequence
  Description of Artificial Sequence: Synthetic oligonucleotide
agaatatggtggggagctgtgat

SEQ ID NO: 896 - DNA, 23 bp, Artificial Sequence
  Description of Artificial Sequence: Synthetic oligonucleotide
tccttctagttatgagccagagt

SEQ ID NO: 897 - DNA, 23 bp, Artificial Sequence
  Description of Artificial Sequence: Synthetic oligonucleotide
cctggtttaatctacagaatgat

SEQ ID NO: 898 - DNA, 23 bp, Artificial Sequence
  Description of Artificial Sequence: Synthetic oligonucleotide
ttctccttatttttgtttctgga

SEQ ID NO: 899 - DNA, 23 bp, Artificial Sequence
  Description of Artificial Sequence: Synthetic oligonucleotide
ttgtttctggaaaagttgtatta

SEQ ID NO: 900 - DNA, 23 bp, Artificial Sequence
  Description of Artificial Sequence: Synthetic oligonucleotide
atgaagcatttgaaaacatctac

SEQ ID NO: 901 - DNA, 23 bp, Artificial Sequence
  Description of Artificial Sequence: Synthetic oligonucleotide
taaagggattcaggaagacgacg

SEQ ID NO: 902 - DNA, 23 bp, Artificial Sequence
  Description of Artificial Sequence: Synthetic oligonucleotide
ggcgtttcgggcacgaagtgcaa

SEQ ID NO: 903 - DNA, 23 bp, Artificial Sequence
  Description of Artificial Sequence: Synthetic oligonucleotide
tattcggcgtttcgggcacgaag

SEQ ID NO: 904 - DNA, 23 bp, Artificial Sequence
  Description of Artificial Sequence: Synthetic oligonucleotide
aaatagatctaaccttgggatta

SEQ ID NO: 905 - DNA, 23 bp, Artificial Sequence
  Description of Artificial Sequence: Synthetic oligonucleotide
tcccagaactgaaaatcagtgcc

SEQ ID NO: 906 - DNA, 23 bp, Artificial Sequence
  Description of Artificial Sequence: Synthetic oligonucleotide
cttacggctacctcttggctcct

SEQ ID NO: 907 - DNA, 23 bp, Artificial Sequence
  Description of Artificial Sequence: Synthetic oligonucleotide
tcttgctgccagtctggactgtt

SEQ ID NO: 908 - DNA, 23 bp, Artificial Sequence
  Description of Artificial Sequence: Synthetic oligonucleotide
tgaatcttgaagtccaagaactt

SEQ ID NO: 909 - DNA, 23 bp, Artificial Sequence
  Description of Artificial Sequence: Synthetic oligonucleotide
ttggtgggtgagcacaaggcctt

SEQ ID NO: 910 - DNA, 23 bp, Artificial Sequence
  Description of Artificial Sequence: Synthetic oligonucleotide
cagacttacctactaaattgttg

SEQ ID NO: 911 - DNA, 23 bp, Artificial Sequence
  Description of Artificial Sequence: Synthetic oligonucleotide
aaccaggaaataactctggctca

SEQ ID NO: 912 - DNA, 23 bp, Artificial Sequence
  Description of Artificial Sequence: Synthetic oligonucleotide
tgtagattaaaccaggaaataac

SEQ ID NO: 913 - DNA, 23 bp, Artificial Sequence
  Description of Artificial Sequence: Synthetic oligonucleotide
tgggtttgatcattctgtagatt

SEQ ID NO: 914 - DNA, 23 bp, Artificial Sequence
  Description of Artificial Sequence: Synthetic oligonucleotide
ctgctctgactttagcacctaag

SEQ ID NO: 915 - DNA, 23 bp, Artificial Sequence
  Description of Artificial Sequence: Synthetic oligonucleotide
cgtcgtcttcctgaatcccttta

SEQ ID NO: 916 - DNA, 23 bp, Artificial Sequence
  Description of Artificial Sequence: Synthetic oligonucleotide
tagtgagtggcggccctgggact

SEQ ID NO: 917 - DNA, 23 bp, Artificial Sequence
  Description of Artificial Sequence: Synthetic oligonucleotide
ccagagtgcatgagctcggagct

SEQ ID NO: 918 - DNA, 23 bp, Artificial Sequence
  Description of Artificial Sequence: Synthetic oligonucleotide
tatctacaacctggacgagagtg

SEQ ID NO: 919 - DNA, 23 bp, Artificial Sequence
  Description of Artificial Sequence: Synthetic oligonucleotide
cctggacttctgcactgccaggg

SEQ ID NO: 920 - DNA, 23 bp, Artificial Sequence
  Description of Artificial Sequence: Synthetic oligonucleotide
ctgacagctctttggggagttcc

SEQ ID NO: 921 - DNA, 23 bp, Artificial Sequence
  Description of Artificial Sequence: Synthetic oligonucleotide
agctggagaagcccaagcccatc

SEQ ID NO: 922 - DNA, 23 bp, Artificial Sequence
  Description of Artificial Sequence: Synthetic oligonucleotide
tcaccccactgctgcaccagatt

SEQ ID NO: 923 - DNA, 23 bp, Artificial Sequence
  Description of Artificial Sequence: Synthetic oligonucleotide
atgaagataaattgatagcacaa

SEQ ID NO: 924 - DNA, 23 bp, Artificial Sequence
  Description of Artificial Sequence: Synthetic oligonucleotide
atagcacaaaatctagaacttaa

SEQ ID NO: 925 - DNA, 23 bp, Artificial Sequence
  Description of Artificial Sequence: Synthetic oligonucleotide
gtttgactaagcttaattgcttt

SEQ ID NO: 926 - DNA, 23 bp, Artificial Sequence
  Description of Artificial Sequence: Synthetic oligonucleotide
ctttctggaacaggatctgaaac

SEQ ID NO: 927 - DNA, 23 bp, Artificial Sequence
  Description of Artificial Sequence: Synthetic oligonucleotide
atacccatcaacactggtaagaa

SEQ ID NO: 928 - DNA, 23 bp, Artificial Sequence
  Description of Artificial Sequence: Synthetic oligonucleotide
ttcatcaattggcggggttccat

SEQ ID NO: 929 - DNA, 23 bp, Artificial Sequence
  Description of Artificial Sequence: Synthetic oligonucleotide
gcggggttccatttttccaggta

SEQ ID NO: 930 - DNA, 23 bp, Artificial Sequence
  Description of Artificial Sequence: Synthetic oligonucleotide
tcccgccttaaatccacagcata

SEQ ID NO: 931 - DNA, 23 bp, Artificial Sequence
  Description of Artificial Sequence: Synthetic oligonucleotide
acacactggagaggtctaaagtg

SEQ ID NO: 932 - DNA, 23 bp, Artificial Sequence
  Description of Artificial Sequence: Synthetic oligonucleotide
cctctgcgagcccagatcaacct

SEQ ID NO: 933 - DNA, 23 bp, Artificial Sequence
  Description of Artificial Sequence: Synthetic oligonucleotide
agttctagattttgtgctatcaa

SEQ ID NO: 934 - DNA, 23 bp, Artificial Sequence
  Description of Artificial Sequence: Synthetic oligonucleotide
ttatggtttcattaagttctaga

SEQ ID NO: 935 - DNA, 23 bp, Artificial Sequence
  Description of Artificial Sequence: Synthetic oligonucleotide
agcttagtcaaaccaatttttat

SEQ ID NO: 936 - DNA, 23 bp, Artificial Sequence
  Description of Artificial Sequence: Synthetic oligonucleotide
ctcttttaaagtacctgttggga

SEQ ID NO: 937 - DNA, 23 bp, Artificial Sequence
  Description of Artificial Sequence: Synthetic oligonucleotide
tatttctcttttaaagtacctgt

SEQ ID NO: 938 - DNA, 23 bp, Artificial Sequence
  Description of Artificial Sequence: Synthetic oligonucleotide
acagctcaggctgtttccttttc

SEQ ID NO: 939 - DNA, 23 bp, Artificial Sequence
  Description of Artificial Sequence: Synthetic oligonucleotide
tctcttctttgttgttttctgaa

SEQ ID NO: 940 - DNA, 23 bp, Artificial Sequence
  Description of Artificial Sequence: Synthetic oligonucleotide
accggaattgtctcttctttgtt

SEQ ID NO: 941 - DNA, 23 bp, Artificial Sequence
  Description of Artificial Sequence: Synthetic oligonucleotide
atgaacaatccacaccagcatct

SEQ ID NO: 942 - DNA, 23 bp, Artificial Sequence
  Description of Artificial Sequence: Synthetic oligonucleotide
aaggttgatctgggctcgcagag

SEQ ID NO: 943 - DNA, 23 bp, Artificial Sequence
  Description of Artificial Sequence: Synthetic oligonucleotide
ccaacccccaagtgaattaaagg

SEQ ID NO: 944 - DNA, 21 bp, Artificial Sequence
  Description of Artificial Sequence: Synthetic oligonucleotide
tcttctaggtatgacaacgaa

SEQ ID NO: 945 - DNA, 21 bp, Artificial Sequence
  Description of Artificial Sequence: Synthetic oligonucleotide
ccagctctcataccatgagtc

SEQ ID NO: 946 - DNA, 21 bp, Artificial Sequence
  Description of Artificial Sequence: Synthetic oligonucleotide
tgcccgaaacgccgaatataa

SEQ ID NO: 947 - DNA, 21 bp, Artificial Sequence
  Description of Artificial Sequence: Synthetic oligonucleotide
ctctgaccattgtagcggttt

SEQ ID NO: 948 - DNA, 21 bp, Artificial Sequence
  Description of Artificial Sequence: Synthetic oligonucleotide
gttctgggaaaatggtgtgca

SEQ ID NO: 949 - DNA, 21 bp, Artificial Sequence
  Description of Artificial Sequence: Synthetic oligonucleotide
gggaaaatggtgtgcacagga

SEQ ID NO: 950 - DNA, 21 bp, Artificial Sequence
  Description of Artificial Sequence: Synthetic oligonucleotide
tttccctagtgaagaacagtc

SEQ ID NO: 951 - DNA, 21 bp, Artificial Sequence
  Description of Artificial Sequence: Synthetic oligonucleotide
ctagtgaagaacagtccagac

SEQ ID NO: 952 - DNA, 21 bp, Artificial Sequence
  Description of Artificial Sequence: Synthetic oligonucleotide
agctaagttcttggacttcaa

SEQ ID NO: 953 - DNA, 21 bp, Artificial Sequence
  Description of Artificial Sequence: Synthetic oligonucleotide
tggacttcaagattcagaata

SEQ ID NO: 954 - DNA, 21 bp, Artificial Sequence
  Description of Artificial Sequence: Synthetic oligonucleotide
agattcagaatatggtgggga

SEQ ID NO: 955 - DNA, 21 bp, Artificial Sequence
  Description of Artificial Sequence: Synthetic oligonucleotide
gaatatggtggggagctgtga

SEQ ID NO: 956 - DNA, 21 bp, Artificial Sequence
  Description of Artificial Sequence: Synthetic oligonucleotide
tataaggttagaaggccttgt

SEQ ID NO: 957 - DNA, 21 bp, Artificial Sequence
  Description of Artificial Sequence: Synthetic oligonucleotide
ttctagttatgagccagagtt

SEQ ID NO: 958 - DNA, 21 bp, Artificial Sequence
  Description of Artificial Sequence: Synthetic oligonucleotide
agttatgagccagagttattt

SEQ ID NO: 959 - DNA, 21 bp, Artificial Sequence
  Description of Artificial Sequence: Synthetic oligonucleotide
tggtttaatctacagaatgat

SEQ ID NO: 960 - DNA, 21 bp, Artificial Sequence
  Description of Artificial Sequence: Synthetic oligonucleotide
ccttatttttgtttctggaaa

SEQ ID NO: 961 - DNA, 21 bp, Artificial Sequence
  Description of Artificial Sequence: Synthetic oligonucleotide
ggaaaagttgtattaacaggt

SEQ ID NO: 962 - DNA, 21 bp, Artificial Sequence
  Description of Artificial Sequence: Synthetic oligonucleotide
taggtgctaaagtcagagcag

SEQ ID NO: 963 - DNA, 21 bp, Artificial Sequence
  Description of Artificial Sequence: Synthetic oligonucleotide
aaagggattcaggaagacgac

SEQ ID NO: 964 - DNA, 21 bp, Artificial Sequence
  Description of Artificial Sequence: Synthetic oligonucleotide
ggcacgaagtgcaatggtctt

SEQ ID NO: 965 - DNA, 21 bp, Artificial Sequence
  Description of Artificial Sequence: Synthetic oligonucleotide
gcgtttcgggcacgaagtgca

SEQ ID NO: 966 - DNA, 21 bp, Artificial Sequence
  Description of Artificial Sequence: Synthetic oligonucleotide
tggctctcttatcctcatgat

SEQ ID NO: 967 - DNA, 21 bp, Artificial Sequence
  Description of Artificial Sequence: Synthetic oligonucleotide
cagaactgaaaatcagtgccg

SEQ ID NO: 968 - DNA, 21 bp, Artificial Sequence
  Description of Artificial Sequence: Synthetic oligonucleotide
tacggctacctcttggctcct

SEQ ID NO: 969 - DNA, 21 bp, Artificial Sequence
  Description of Artificial Sequence: Synthetic oligonucleotide
tgctgccagtctggactgttc

SEQ ID NO: 970 - DNA, 21 bp, Artificial Sequence
  Description of Artificial Sequence: Synthetic oligonucleotide
gtacaactctagcatattttc

SEQ ID NO: 971 - DNA, 21 bp, Artificial Sequence
  Description of Artificial Sequence: Synthetic oligonucleotide
gaatcttgaagtccaagaact

SEQ ID NO: 972 - DNA, 21 bp, Artificial Sequence
  Description of Artificial Sequence: Synthetic oligonucleotide
catcacagctccccaccatat

SEQ ID NO: 973 - DNA, 21 bp, Artificial Sequence
  Description of Artificial Sequence: Synthetic oligonucleotide
aaccttataggaaacttcaca

SEQ ID NO: 974 - DNA, 21 bp, Artificial Sequence
  Description of Artificial Sequence: Synthetic oligonucleotide
gacttacctactaaattgttg

SEQ ID NO: 975 - DNA, 21 bp, Artificial Sequence
  Description of Artificial Sequence: Synthetic oligonucleotide
gtagattaaaccaggaaataa

SEQ ID NO: 976 - DNA, 21 bp, Artificial Sequence
  Description of Artificial Sequence: Synthetic oligonucleotide
gggtttgatcattctgtagat

SEQ ID NO: 977 - DNA, 21 bp, Artificial Sequence
  Description of Artificial Sequence: Synthetic oligonucleotide
agaaacaaaaataaggagaac

SEQ ID NO: 978 - DNA, 21 bp, Artificial Sequence
  Description of Artificial Sequence: Synthetic oligonucleotide
tgttacaacttacctgttaat

SEQ ID NO: 979 - DNA, 21 bp, Artificial Sequence
  Description of Artificial Sequence: Synthetic oligonucleotide
gctctgactttagcacctaag

SEQ ID NO: 980 - DNA, 21 bp, Artificial Sequence
  Description of Artificial Sequence: Synthetic oligonucleotide
taaatttctgctctgacttta

SEQ ID NO: 981 - DNA, 21 bp, Artificial Sequence
  Description of Artificial Sequence: Synthetic oligonucleotide
aatgcttcataaatttctgct

SEQ ID NO: 982 - DNA, 21 bp, Artificial Sequence
  Description of Artificial Sequence: Synthetic oligonucleotide
tgaatccctttagaatagggt

SEQ ID NO: 983 - DNA, 21 bp, Artificial Sequence
  Description of Artificial Sequence: Synthetic oligonucleotide
ctcccactgggcccaacaaca

SEQ ID NO: 984 - DNA, 21 bp, Artificial Sequence
  Description of Artificial Sequence: Synthetic oligonucleotide
gccctgctggacagcagcagc

SEQ ID NO: 985 - DNA, 21 bp, Artificial Sequence
  Description of Artificial Sequence: Synthetic oligonucleotide
tccggacccaacccttctacc

SEQ ID NO: 986 - DNA, 21 bp, Artificial Sequence
  Description of Artificial Sequence: Synthetic oligonucleotide
acctcctttgagcccatcaag

SEQ ID NO: 987 - DNA, 21 bp, Artificial Sequence
  Description of Artificial Sequence: Synthetic oligonucleotide
tgtttttcagttttggaactc

SEQ ID NO: 988 - DNA, 21 bp, Artificial Sequence
  Description of Artificial Sequence: Synthetic oligonucleotide
gttttggaactccccaaagag

SEQ ID NO: 989 - DNA, 21 bp, Artificial Sequence
  Description of Artificial Sequence: Synthetic oligonucleotide
cagagtgcatgagctcggagc

SEQ ID NO: 990 - DNA, 21 bp, Artificial Sequence
  Description of Artificial Sequence: Synthetic oligonucleotide
tctttctccacccccgggaga

SEQ ID NO: 991 - DNA, 21 bp, Artificial Sequence
  Description of Artificial Sequence: Synthetic oligonucleotide
ccacccccgggagaccacgat

SEQ ID NO: 992 - DNA, 21 bp, Artificial Sequence
  Description of Artificial Sequence: Synthetic oligonucleotide
gcactgccagggacagcagtg

SEQ ID NO: 993 - DNA, 21 bp, Artificial Sequence
  Description of Artificial Sequence: Synthetic oligonucleotide
ctggacttctgcactgccagg

SEQ ID NO: 994 - DNA, 21 bp, Artificial Sequence
  Description of Artificial Sequence: Synthetic oligonucleotide
gacagctctttggggagttcc

SEQ ID NO: 995 - DNA, 21 bp, Artificial Sequence
  Description of Artificial Sequence: Synthetic oligonucleotide
gaggacatcaactcctccagc

SEQ ID NO: 996 - DNA, 21 bp, Artificial Sequence
  Description of Artificial Sequence: Synthetic oligonucleotide
agggccacccaccttctgagg

SEQ ID NO: 997 - DNA, 21 bp, Artificial Sequence
  Description of Artificial Sequence: Synthetic oligonucleotide
ctctcgtccaggttgtagata

SEQ ID NO: 998 - DNA, 21 bp, Artificial Sequence
  Description of Artificial Sequence: Synthetic oligonucleotide
cccacttgtaggtgccctcat

SEQ ID NO: 999 - DNA, 21 bp, Artificial Sequence
  Description of Artificial Sequence: Synthetic oligonucleotide
tcagctcgtctgcctccgtgg

SEQ ID NO: 1000 - DNA, 21 bp, Artificial Sequence
  Description of Artificial Sequence: Synthetic oligonucleotide
tcacctgccataaatataggg

SEQ ID NO: 1001 - DNA, 21 bp, Artificial Sequence
  Description of Artificial Sequence: Synthetic oligonucleotide
ccagctcaatctggtgcagca

SEQ ID NO: 1002 - DNA, 21 bp, Artificial Sequence
  Description of Artificial Sequence: Synthetic oligonucleotide
ctgtagggcaccttgtatctg

SEQ ID NO: 1003 - DNA, 21 bp, Artificial Sequence
  Description of Artificial Sequence: Synthetic oligonucleotide
tggtcatcatcttggtgtaca

SEQ ID NO: 1004 - DNA, 21 bp, Artificial Sequence
  Description of Artificial Sequence: Synthetic oligonucleotide
gggccttgccgcagcgcagga

SEQ ID NO: 1005 - DNA, 21 bp, Artificial Sequence
  Description of Artificial Sequence: Synthetic oligonucleotide
agtatgagggcacctacaagt

SEQ ID NO: 1006 - DNA, 21 bp, Artificial Sequence
  Description of Artificial Sequence: Synthetic oligonucleotide
ccccactgctgcaccagattg

SEQ ID NO: 1007 - DNA, 21 bp, Artificial Sequence
  Description of Artificial Sequence: Synthetic oligonucleotide
gcgggagccagatgcacttcg

SEQ ID NO: 1008 - DNA, 21 bp, Artificial Sequence
  Description of Artificial Sequence: Synthetic oligonucleotide
accccgaggagtcggagctgg

SEQ ID NO: 1009 - DNA, 21 bp, Artificial Sequence
  Description of Artificial Sequence: Synthetic oligonucleotide
tcaaccccgaggagtcggagc

SEQ ID NO: 1010 - DNA, 21 bp, Artificial Sequence
  Description of Artificial Sequence: Synthetic oligonucleotide
accagcagtgcaagcgcaacg

SEQ ID NO: 1011 - DNA, 21 bp, Artificial Sequence
  Description of Artificial Sequence: Synthetic oligonucleotide
atgatgtggccggcgacatct

SEQ ID NO: 1012 - DNA, 21 bp, Artificial Sequence
  Description of Artificial Sequence: Synthetic oligonucleotide
tcctgcgctgcggcaaggccc

SEQ ID NO: 1013 - DNA, 21 bp, Artificial Sequence
  Description of Artificial Sequence: Synthetic oligonucleotide
gccacgtaggggtgcccttca

SEQ ID NO: 1014 - DNA, 21 bp, Artificial Sequence
  Description of Artificial Sequence: Synthetic oligonucleotide
ggaacaggatctgaaactgga

SEQ ID NO: 1015 - DNA, 21 bp, Artificial Sequence
  Description of Artificial Sequence: Synthetic oligonucleotide
gaaaacaacaaagaagagaca

SEQ ID NO: 1016 - DNA, 21 bp, Artificial Sequence
  Description of Artificial Sequence: Synthetic oligonucleotide
tcttttaggatgtggatgtag

SEQ ID NO: 1017 - DNA, 21 bp, Artificial Sequence
  Description of Artificial Sequence: Synthetic oligonucleotide
tttaggatgtggatgtagaag

SEQ ID NO: 1018 - DNA, 21 bp, Artificial Sequence
  Description of Artificial Sequence: Synthetic oligonucleotide
ggggcagtatactgaagaacc

SEQ ID NO: 1019 - DNA, 21 bp, Artificial Sequence
  Description of Artificial Sequence: Synthetic oligonucleotide
tcaattggcggggttccattt

SEQ ID NO: 1020 - DNA, 21 bp, Artificial Sequence
  Description of Artificial Sequence: Synthetic oligonucleotide
cgccttaaatccacagcataa

SEQ ID NO: 1021 - DNA, 21 bp, Artificial Sequence
  Description of Artificial Sequence: Synthetic oligonucleotide
agattttgtgctatcaattta

SEQ ID NO: 1022 - DNA, 21 bp, Artificial Sequence
  Description of Artificial Sequence: Synthetic oligonucleotide
ttaagttctagattttgtgct

SEQ ID NO: 1023 - DNA, 21 bp, Artificial Sequence
  Description of Artificial Sequence: Synthetic oligonucleotide
agaaagcaattaagcttagtc

SEQ ID NO: 1024 - DNA, 21 bp, Artificial Sequence
  Description of Artificial Sequence: Synthetic oligonucleotide
gatcctgttccagaaagcaat

SEQ ID NO: 1025 - DNA, 21 bp, Artificial Sequence
  Description of Artificial Sequence: Synthetic oligonucleotide
cttttaaagtacctgttggga

SEQ ID NO: 1026 - DNA, 21 bp, Artificial Sequence
  Description of Artificial Sequence: Synthetic oligonucleotide
atttctcttttaaagtacctg

SEQ ID NO: 1027 - DNA, 21 bp, Artificial Sequence
  Description of Artificial Sequence: Synthetic oligonucleotide
tctgtggtgtcgtacctttaa

SEQ ID NO: 1028 - DNA, 21 bp, Artificial Sequence
  Description of Artificial Sequence: Synthetic oligonucleotide
taccagtgttgatgggtataa

SEQ ID NO: 1029 - DNA, 21 bp, Artificial Sequence
  Description of Artificial Sequence: Synthetic oligonucleotide
gttcttaccagtgttgatggg

SEQ ID NO: 1030 - DNA, 21 bp, Artificial Sequence
  Description of Artificial Sequence: Synthetic oligonucleotide
cgtggttcagttcttaccagt

SEQ ID NO: 1031 - DNA, 21 bp, Artificial Sequence
  Description of Artificial Sequence: Synthetic oligonucleotide
gctgatcaaggagatgttcac

SEQ ID NO: 1032 - DNA, 21 bp, Artificial Sequence
  Description of Artificial Sequence: Synthetic oligonucleotide
ttttcagctgatcaaggagat

SEQ ID NO: 1033 - DNA, 21 bp, Artificial Sequence
  Description of Artificial Sequence: Synthetic oligonucleotide
gaacagtttagcatcattaac

SEQ ID NO: 1034 - DNA, 21 bp, Artificial Sequence
  Description of Artificial Sequence: Synthetic oligonucleotide
ttgttgttttctgaacagttt

SEQ ID NO: 1035 - DNA, 21 bp, Artificial Sequence
  Description of Artificial Sequence: Synthetic oligonucleotide
gtatactgccccagaactgcc

SEQ ID NO: 1036 - DNA, 21 bp, Artificial Sequence
  Description of Artificial Sequence: Synthetic oligonucleotide
tcagtatactgccccagaact

SEQ ID NO: 1037 - DNA, 21 bp, Artificial Sequence
  Description of Artificial Sequence: Synthetic oligonucleotide
atgtgattttttatgctgtgg

SEQ ID NO: 1038 - DNA, 21 bp, Artificial Sequence
  Description of Artificial Sequence: Synthetic oligonucleotide
ttgtcttttccatgtgatttt

SEQ ID NO: 1039 - DNA, 21 bp, Artificial Sequence
  Description of Artificial Sequence: Synthetic oligonucleotide
actttagacctctccagtgtg

SEQ ID NO: 1040 - DNA, 21 bp, Artificial Sequence
  Description of Artificial Sequence: Synthetic oligonucleotide
tccactttagacctctccagt

SEQ ID NO: 1041 - DNA, 21 bp, Artificial Sequence
  Description of Artificial Sequence: Synthetic oligonucleotide
tgcagaccacagtccatgcca

SEQ ID NO: 1042 - DNA, 21 bp, Artificial Sequence
  Description of Artificial Sequence: Synthetic oligonucleotide
gcagaccacagtccatgccat

SEQ ID NO: 1043 - DNA, 21 bp, Artificial Sequence
  Description of Artificial Sequence: Synthetic oligonucleotide
cagaccacagtccatgccatc

SEQ ID NO: 1044 - DNA, 21 bp, Artificial Sequence
  Description of Artificial Sequence: Synthetic oligonucleotide
tcatcttctaggtatgacaac

SEQ ID NO: 1045 - DNA, 21 bp, Artificial Sequence
  Description of Artificial Sequence: Synthetic oligonucleotide
catcttctaggtatgacaacg

SEQ ID NO: 1046 - DNA, 21 bp, Artificial Sequence
  Description of Artificial Sequence: Synthetic oligonucleotide
atcttctaggtatgacaacga

SEQ ID NO: 1047 - DNA, 21 bp, Artificial Sequence
  Description of Artificial Sequence: Synthetic oligonucleotide
taggtatgacaacgaatttgg

SEQ ID NO: 1048 - DNA, 21 bp, Artificial Sequence
  Description of Artificial Sequence: Synthetic oligonucleotide
cccagctctcataccatgagt

SEQ ID NO: 1049 - DNA, 21 bp, Artificial Sequence
  Description of Artificial Sequence: Synthetic oligonucleotide
tatccacagtgaatcttggtt

SEQ ID NO: 1050 - DNA, 21 bp, Artificial Sequence
  Description of Artificial Sequence: Synthetic oligonucleotide
gttgtaaacttgacctaaaga

SEQ ID NO: 1051 - DNA, 21 bp, Artificial Sequence
  Description of Artificial Sequence: Synthetic oligonucleotide
taaacttgacctaaagaccat

SEQ ID NO: 1052 - DNA, 21 bp, Artificial Sequence
  Description of Artificial Sequence: Synthetic oligonucleotide
acctaaagaccattgcacttc

SEQ ID NO: 1053 - DNA, 21 bp, Artificial Sequence
  Description of Artificial Sequence: Synthetic oligonucleotide
cacttcgtgcccgaaacgccg

SEQ ID NO: 1054 - DNA, 21 bp, Artificial Sequence
  Description of Artificial Sequence: Synthetic oligonucleotide
gtgcccgaaacgccgaatata

SEQ ID NO: 1055 - DNA, 21 bp, Artificial Sequence
  Description of Artificial Sequence: Synthetic oligonucleotide
tctctgaccattgtagcggtt

SEQ ID NO: 1056 - DNA, 21 bp, Artificial Sequence
  Description of Artificial Sequence: Synthetic oligonucleotide
tagcggtttgctgcggtaatc

SEQ ID NO: 1057 - DNA, 21 bp, Artificial Sequence
  Description of Artificial Sequence: Synthetic oligonucleotide
gctgcggtaatcatgaggata

SEQ ID NO: 1058 - DNA, 21 bp, Artificial Sequence
  Description of Artificial Sequence: Synthetic oligonucleotide
ctgcggtaatcatgaggataa

SEQ ID NO: 1059 - DNA, 21 bp, Artificial Sequence
  Description of Artificial Sequence: Synthetic oligonucleotide
tcagttctgggaaaatggtgt

SEQ ID NO: 1060 - DNA, 21 bp, Artificial Sequence
  Description of Artificial Sequence: Synthetic oligonucleotide
cagttctgggaaaatggtgtg

SEQ ID NO: 1061 - DNA, 21 bp, Artificial Sequence
  Description of Artificial Sequence: Synthetic oligonucleotide
agttctgggaaaatggtgtgc

SEQ ID NO: 1062 - DNA, 21 bp, Artificial Sequence
  Description of Artificial Sequence: Synthetic oligonucleotide
tgggaaaatggtgtgcacagg

SEQ ID NO: 1063 - DNA, 21 bp, Artificial Sequence
  Description of Artificial Sequence: Synthetic oligonucleotide
tttcctttccctagtgaagaa

SEQ ID NO: 1064 - DNA, 21 bp, Artificial Sequence
  Description of Artificial Sequence: Synthetic oligonucleotide
ttcctttccctagtgaagaac

SEQ ID NO: 1065 - DNA, 21 bp, Artificial Sequence
  Description of Artificial Sequence: Synthetic oligonucleotide
tcctttccctagtgaagaaca

SEQ ID NO: 1066 - DNA, 21 bp, Artificial Sequence
  Description of Artificial Sequence: Synthetic oligonucleotide
cctttccctagtgaagaacag

SEQ ID NO: 1067 - DNA, 21 bp, Artificial Sequence
  Description of Artificial Sequence: Synthetic oligonucleotide
ctttccctagtgaagaacagt

SEQ ID NO: 1068 - DNA, 21 bp, Artificial Sequence
  Description of Artificial Sequence: Synthetic oligonucleotide
ccctagtgaagaacagtccag

SEQ ID NO: 1069 - DNA, 21 bp, Artificial Sequence
  Description of Artificial Sequence: Synthetic oligonucleotide
cctagtgaagaacagtccaga

SEQ ID NO: 1070 - DNA, 21 bp, Artificial Sequence
  Description of Artificial Sequence: Synthetic oligonucleotide
tacagaagttgggttttccag

SEQ ID NO: 1071 - DNA, 21 bp, Artificial Sequence
  Description of Artificial Sequence: Synthetic oligonucleotide
ggttttccagctaagttcttg

SEQ ID NO: 1072 - DNA, 21 bp, Artificial Sequence
  Description of Artificial Sequence: Synthetic oligonucleotide
tccagctaagttcttggactt

SEQ ID NO: 1073 - DNA, 21 bp, Artificial Sequence
  Description of Artificial Sequence: Synthetic oligonucleotide
ccagctaagttcttggacttc

SEQ ID NO: 1074 - DNA, 21 bp, Artificial Sequence
  Description of Artificial Sequence: Synthetic oligonucleotide
cagctaagttcttggacttca

SEQ ID NO: 1075 - DNA, 21 bp, Artificial Sequence
  Description of Artificial Sequence: Synthetic oligonucleotide
ttggacttcaagattcagaat

SEQ ID NO: 1076 - DNA, 21 bp, Artificial Sequence
  Description of Artificial Sequence: Synthetic oligonucleotide
gacttcaagattcagaatatg

SEQ ID NO: 1077 - DNA, 21 bp, Artificial Sequence
  Description of Artificial Sequence: Synthetic oligonucleotide
aagattcagaatatggtgggg

SEQ ID NO: 1078 - DNA, 21 bp, Artificial Sequence
  Description of Artificial Sequence: Synthetic oligonucleotide
agaatatggtggggagctgtg

SEQ ID NO: 1079 - DNA, 21 bp, Artificial Sequence
  Description of Artificial Sequence: Synthetic oligonucleotide
cctataaggttagaaggcctt

SEQ ID NO: 1080 - DNA, 21 bp, Artificial Sequence
  Description of Artificial Sequence: Synthetic oligonucleotide
ctataaggttagaaggccttg

SEQ ID NO: 1081 - DNA, 21 bp, Artificial Sequence
  Description of Artificial Sequence: Synthetic oligonucleotide
tgctcacccaccaacaattta

SEQ ID NO: 1082 - DNA, 21 bp, Artificial Sequence
  Description of Artificial Sequence: Synthetic oligonucleotide
ttgcaattttccttctagtta

SEQ ID NO: 1083 - DNA, 21 bp, Artificial Sequence
  Description of Artificial Sequence: Synthetic oligonucleotide
tgcaattttccttctagttat

SEQ ID NO: 1084 - DNA, 21 bp, Artificial Sequence
  Description of Artificial Sequence: Synthetic oligonucleotide
gcaattttccttctagttatg

SEQ ID NO: 1085 - DNA, 21 bp, Artificial Sequence
  Description of Artificial Sequence: Synthetic oligonucleotide
caattttccttctagttatga

SEQ ID NO: 1086 - DNA, 21 bp, Artificial Sequence
  Description of Artificial Sequence: Synthetic oligonucleotide
tccttctagttatgagccaga

SEQ ID NO: 1087 - DNA, 21 bp, Artificial Sequence
  Description of Artificial Sequence: Synthetic oligonucleotide
ccttctagttatgagccagag

SEQ ID NO: 1088 - DNA, 21 bp, Artificial Sequence
  Description of Artificial Sequence: Synthetic oligonucleotide
cttctagttatgagccagagt

SEQ ID NO: 1089 - DNA, 21 bp, Artificial Sequence
  Description of Artificial Sequence: Synthetic oligonucleotide
tagttatgagccagagttatt

SEQ ID NO: 1090 - DNA, 21 bp, Artificial Sequence
  Description of Artificial Sequence: Synthetic oligonucleotide
tgagccagagttatttcctgg

SEQ ID NO: 1091 - DNA, 21 bp, Artificial Sequence
  Description of Artificial Sequence: Synthetic oligonucleotide
cctggtttaatctacagaatg

SEQ ID NO: 1092 - DNA, 21 bp, Artificial Sequence
  Description of Artificial Sequence: Synthetic oligonucleotide
ctggtttaatctacagaatga

SEQ ID NO: 1093 - DNA, 21 bp, Artificial Sequence
  Description of Artificial Sequence: Synthetic oligonucleotide
aatctacagaatgatcaaacc

SEQ ID NO: 1094 - DNA, 21 bp, Artificial Sequence
  Description of Artificial Sequence: Synthetic oligonucleotide
atctacagaatgatcaaaccc

SEQ ID NO: 1095 - DNA, 21 bp, Artificial Sequence
  Description of Artificial Sequence: Synthetic oligonucleotide
ttctccttatttttgtttctg

SEQ ID NO: 1096 - DNA, 21 bp, Artificial Sequence
  Description of Artificial Sequence: Synthetic oligonucleotide
tccttatttttgtttctggaa

SEQ ID NO: 1097 - DNA, 21 bp, Artificial Sequence
  Description of Artificial Sequence: Synthetic oligonucleotide
tttttgtttctggaaaagttg

SEQ ID NO: 1098 - DNA, 21 bp, Artificial Sequence
  Description of Artificial Sequence: Synthetic oligonucleotide
ttgtttctggaaaagttgtat

SEQ ID NO: 1099 - DNA, 21 bp, Artificial Sequence
  Description of Artificial Sequence: Synthetic oligonucleotide
tgtttctggaaaagttgtatt

SEQ ID NO: 1100 - DNA, 21 bp, Artificial Sequence
  Description of Artificial Sequence: Synthetic oligonucleotide
gtttctggaaaagttgtatta

SEQ ID NO: 1101 - DNA, 21 bp, Artificial Sequence
  Description of Artificial Sequence: Synthetic oligonucleotide
tttctggaaaagttgtattaa

SEQ ID NO: 1102 - DNA, 21 bp, Artificial Sequence
  Description of Artificial Sequence: Synthetic oligonucleotide
ctggaaaagttgtattaacag

SEQ ID NO: 1103 - DNA, 21 bp, Artificial Sequence
  Description of Artificial Sequence: Synthetic oligonucleotide
tggaaaagttgtattaacagg

SEQ ID NO: 1104 - DNA, 21 bp, Artificial Sequence
  Description of Artificial Sequence: Synthetic oligonucleotide
tcttcttaggtgctaaagtca

SEQ ID NO: 1105 - DNA, 21 bp, Artificial Sequence
  Description of Artificial Sequence: Synthetic oligonucleotide
ttaggtgctaaagtcagagca

SEQ ID NO: 1106 - DNA, 21 bp, Artificial Sequence
  Description of Artificial Sequence: Synthetic oligonucleotide
ggtgctaaagtcagagcagaa

SEQ ID NO: 1107 - DNA, 21 bp, Artificial Sequence
  Description of Artificial Sequence: Synthetic oligonucleotide
taaagggattcaggaagacga

SEQ ID NO: 1108 - DNA, 21 bp, Artificial Sequence
  Description of Artificial Sequence: Synthetic oligonucleotide
ggtcaagtttacaaccaagat

SEQ ID NO: 1109 - DNA, 21 bp, Artificial Sequence
  Description of Artificial Sequence: Synthetic oligonucleotide
aggtcaagtttacaaccaaga

SEQ ID NO: 1110 - DNA, 21 bp, Artificial Sequence
  Description of Artificial Sequence: Synthetic oligonucleotide
gggcacgaagtgcaatggtct

SEQ ID NO: 1111 - DNA, 21 bp, Artificial Sequence
  Description of Artificial Sequence: Synthetic oligonucleotide
cgggcacgaagtgcaatggtc

SEQ ID NO: 1112 - DNA, 21 bp, Artificial Sequence
  Description of Artificial Sequence: Synthetic oligonucleotide
ggcgtttcgggcacgaagtgc

SEQ ID NO: 1113 - DNA, 21 bp, Artificial Sequence
  Description of Artificial Sequence: Synthetic oligonucleotide
tattcggcgtttcgggcacga

SEQ ID NO: 1114 - DNA, 21 bp, Artificial Sequence
  Description of Artificial Sequence: Synthetic oligonucleotide
ggattatattcggcgtttcgg

SEQ ID NO: 1115 - DNA, 21 bp, Artificial Sequence
  Description of Artificial Sequence: Synthetic oligonucleotide
aaatagatctaaccttgggat

SEQ ID NO: 1116 - DNA, 21 bp, Artificial Sequence
  Description of Artificial Sequence: Synthetic oligonucleotide
tcctcatgattaccgcagcaa

SEQ ID NO: 1117 - DNA, 21 bp, Artificial Sequence
  Description of Artificial Sequence: Synthetic oligonucleotide
gtggctctcttatcctcatga

SEQ ID NO: 1118 - DNA, 21 bp, Artificial Sequence
  Description of Artificial Sequence: Synthetic oligonucleotide
ccagaactgaaaatcagtgcc

SEQ ID NO: 1119 - DNA, 21 bp, Artificial Sequence
  Description of Artificial Sequence: Synthetic oligonucleotide
cccagaactgaaaatcagtgc

SEQ ID NO: 1120 - DNA, 21 bp, Artificial Sequence
  Description of Artificial Sequence: Synthetic oligonucleotide
tcccagaactgaaaatcagtg

SEQ ID NO: 1121 - DNA, 21 bp, Artificial Sequence
  Description of Artificial Sequence: Synthetic oligonucleotide
gctcctgtgcacaccattttc

SEQ ID NO: 1122 - DNA, 21 bp, Artificial Sequence
  Description of Artificial Sequence: Synthetic oligonucleotide
cggctacctcttggctcctgt

SEQ ID NO: 1123 - DNA, 21 bp, Artificial Sequence
  Description of Artificial Sequence: Synthetic oligonucleotide
ttacggctacctcttggctcc

SEQ ID NO: 1124 - DNA, 21 bp, Artificial Sequence
  Description of Artificial Sequence: Synthetic oligonucleotide
cttacggctacctcttggctc

SEQ ID NO: 1125 - DNA, 21 bp, Artificial Sequence
  Description of Artificial Sequence: Synthetic oligonucleotide
ctgccagtctggactgttctt

SEQ ID NO: 1126 - DNA, 21 bp, Artificial Sequence
  Description of Artificial Sequence: Synthetic oligonucleotide
ttgctgccagtctggactgtt

SEQ ID NO: 1127 - DNA, 21 bp, Artificial Sequence
  Description of Artificial Sequence: Synthetic oligonucleotide
cttgctgccagtctggactgt

SEQ ID NO: 1128 - DNA, 21 bp, Artificial Sequence
  Description of Artificial Sequence: Synthetic oligonucleotide
tcttgctgccagtctggactg

SEQ ID NO: 1129 - DNA, 21 bp, Artificial Sequence
  Description of Artificial Sequence: Synthetic oligonucleotide
tgtacaactctagcatatttt

SEQ ID NO: 1130 - DNA, 21 bp, Artificial Sequence
  Description of Artificial Sequence: Synthetic oligonucleotide
gctggaaaacccaacttctgt

SEQ ID NO: 1131 - DNA, 21 bp, Artificial Sequence
  Description of Artificial Sequence: Synthetic oligonucleotide
aagtccaagaacttagctgga

SEQ ID NO: 1132 - DNA, 21 bp, Artificial Sequence
  Description of Artificial Sequence: Synthetic oligonucleotide
tgaatcttgaagtccaagaac

SEQ ID NO: 1133 - DNA, 21 bp, Artificial Sequence
  Description of Artificial Sequence: Synthetic oligonucleotide
acatcacagctccccaccata

SEQ ID NO: 1134 - DNA, 21 bp, Artificial Sequence
  Description of Artificial Sequence: Synthetic oligonucleotide
taaccttataggaaacttcac

SEQ ID NO: 1135 - DNA, 21 bp, Artificial Sequence
  Description of Artificial Sequence: Synthetic oligonucleotide
gtgggtgagcacaaggccttc

SEQ ID NO: 1136 - DNA, 21 bp, Artificial Sequence
  Description of Artificial Sequence: Synthetic oligonucleotide
ttggtgggtgagcacaaggcc

SEQ ID NO: 1137 - DNA, 21 bp, Artificial Sequence
  Description of Artificial Sequence: Synthetic oligonucleotide
cctactaaattgttggtgggt

SEQ ID NO: 1138 - DNA, 21 bp, Artificial Sequence
  Description of Artificial Sequence: Synthetic oligonucleotide
agacttacctactaaattgtt

SEQ ID NO: 1139 - DNA, 21 bp, Artificial Sequence
  Description of Artificial Sequence: Synthetic oligonucleotide
cagacttacctactaaattgt

SEQ ID NO: 1140 - DNA, 21 bp, Artificial Sequence
  Description of Artificial Sequence: Synthetic oligonucleotide
aaccaggaaataactctggct

SEQ ID NO: 1141 - DNA, 21 bp, Artificial Sequence
  Description of Artificial Sequence: Synthetic oligonucleotide
tgtagattaaaccaggaaata

SEQ ID NO: 1142 - DNA, 21 bp, Artificial Sequence
  Description of Artificial Sequence: Synthetic oligonucleotide
atcattctgtagattaaacca

SEQ ID NO: 1143 - DNA, 21 bp, Artificial Sequence
  Description of Artificial Sequence: Synthetic oligonucleotide
gatcattctgtagattaaacc

SEQ ID NO: 1144 - DNA, 21 bp, Artificial Sequence
  Description of Artificial Sequence: Synthetic oligonucleotide
tgggtttgatcattctgtaga

SEQ ID NO: 1145 - DNA, 21 bp, Artificial Sequence
  Description of Artificial Sequence: Synthetic oligonucleotide
cagaaacaaaaataaggagaa

SEQ ID NO: 1146 - DNA, 21 bp, Artificial Sequence
  Description of Artificial Sequence: Synthetic oligonucleotide
ccagaaacaaaaataaggaga

SEQ ID NO: 1147 - DNA, 21 bp, Artificial Sequence
  Description of Artificial Sequence: Synthetic oligonucleotide
tccagaaacaaaaataaggag

SEQ ID NO: 1148 - DNA, 21 bp, Artificial Sequence
  Description of Artificial Sequence: Synthetic oligonucleotide
atacaacttttccagaaacaa

SEQ ID NO: 1149 - DNA, 21 bp, Artificial Sequence
  Description of Artificial Sequence: Synthetic oligonucleotide
cctgttaatacaacttttcca

SEQ ID NO: 1150 - DNA, 21 bp, Artificial Sequence
  Description of Artificial Sequence: Synthetic oligonucleotide
caacttacctgttaatacaac

SEQ ID NO: 1151 - DNA, 21 bp, Artificial Sequence
  Description of Artificial Sequence: Synthetic oligonucleotide
ctgttacaacttacctgttaa

SEQ ID NO: 1152 - DNA, 21 bp, Artificial Sequence
  Description of Artificial Sequence: Synthetic oligonucleotide
tgctctgactttagcacctaa

SEQ ID NO: 1153 - DNA, 21 bp, Artificial Sequence
  Description of Artificial Sequence: Synthetic oligonucleotide
ctgctctgactttagcaccta

SEQ ID NO: 1154 - DNA, 21 bp, Artificial Sequence
  Description of Artificial Sequence: Synthetic oligonucleotide
ataaatttctgctctgacttt

SEQ ID NO: 1155 - DNA, 21 bp, Artificial Sequence
  Description of Artificial Sequence: Synthetic oligonucleotide
aaatgcttcataaatttctgc

SEQ ID NO: 1156 - DNA, 21 bp, Artificial Sequence
  Description of Artificial Sequence: Synthetic oligonucleotide
caaatgcttcataaatttctg

SEQ ID NO: 1157 - DNA, 21 bp, Artificial Sequence
  Description of Artificial Sequence: Synthetic oligonucleotide
tcaaatgcttcataaatttct

SEQ ID NO: 1158 - DNA, 21 bp, Artificial Sequence
  Description of Artificial Sequence: Synthetic oligonucleotide
ctgaatccctttagaataggg

SEQ ID NO: 1159 - DNA, 21 bp, Artificial Sequence
  Description of Artificial Sequence: Synthetic oligonucleotide
cgtcgtcttcctgaatccctt

SEQ ID NO: 1160 - DNA, 21 bp, Artificial Sequence
  Description of Artificial Sequence: Synthetic oligonucleotide
gggggctatcattgtagtgag

SEQ ID NO: 1161 - DNA, 21 bp, Artificial Sequence
  Description of Artificial Sequence: Synthetic oligonucleotide
ggggctatcattgtagtgagt

SEQ ID NO: 1162 - DNA, 21 bp, Artificial Sequence
  Description of Artificial Sequence: Synthetic oligonucleotide
tagtgagtggcggccctggga

SEQ ID NO: 1163 - DNA, 21 bp, Artificial Sequence
  Description of Artificial Sequence: Synthetic oligonucleotide
actcccactgggcccaacaac

SEQ ID NO: 1164 - DNA, 21 bp, Artificial Sequence
  Description of Artificial Sequence: Synthetic oligonucleotide
tgccctgctggacagcagcag

SEQ ID NO: 1165 - DNA, 21 bp, Artificial Sequence
  Description of Artificial Sequence: Synthetic oligonucleotide
gtccggacccaacccttctac

SEQ ID NO: 1166 - DNA, 21 bp, Artificial Sequence
  Description of Artificial Sequence: Synthetic oligonucleotide
tacctcctttgagcccatcaa

SEQ ID NO: 1167 - DNA, 21 bp, Artificial Sequence
  Description of Artificial Sequence: Synthetic oligonucleotide
gagcccatcaaggcagacccc

SEQ ID NO: 1168 - DNA, 21 bp, Artificial Sequence
  Description of Artificial Sequence: Synthetic oligonucleotide
agcccatcaaggcagacccca

SEQ ID NO: 1169 - DNA, 21 bp, Artificial Sequence
  Description of Artificial Sequence: Synthetic oligonucleotide
cttgtttttcagttttggaac

SEQ ID NO: 1170 - DNA, 21 bp, Artificial Sequence
  Description of Artificial Sequence: Synthetic oligonucleotide
tttttcagttttggaactccc

SEQ ID NO: 1171 - DNA, 21 bp, Artificial Sequence
  Description of Artificial Sequence: Synthetic oligonucleotide
ttcagttttggaactccccaa

SEQ ID NO: 1172 - DNA, 21 bp, Artificial Sequence
  Description of Artificial Sequence: Synthetic oligonucleotide
tcagttttggaactccccaaa

SEQ ID NO: 1173 - DNA, 21 bp, Artificial Sequence
  Description of Artificial Sequence: Synthetic oligonucleotide
cagttttggaactccccaaag

SEQ ID NO: 1174 - DNA, 21 bp, Artificial Sequence
  Description of Artificial Sequence: Synthetic oligonucleotide
agttttggaactccccaaaga

SEQ ID NO: 1175 - DNA, 21 bp, Artificial Sequence
  Description of Artificial Sequence: Synthetic oligonucleotide
tggaactccccaaagagctgt

SEQ ID NO: 1176 - DNA, 21 bp, Artificial Sequence
  Description of Artificial Sequence: Synthetic oligonucleotide
ggaactccccaaagagctgtc

SEQ ID NO: 1177 - DNA, 21 bp, Artificial Sequence
  Description of Artificial Sequence: Synthetic oligonucleotide
ccagagtgcatgagctcggag

SEQ ID NO: 1178 - DNA, 21 bp, Artificial Sequence
  Description of Artificial Sequence: Synthetic oligonucleotide
gcccctctgcttcgtctttct

SEQ ID NO: 1179 - DNA, 21 bp, Artificial Sequence
  Description of Artificial Sequence: Synthetic oligonucleotide
cccctctgcttcgtctttctc

SEQ ID NO: 1180 - DNA, 21 bp, Artificial Sequence
  Description of Artificial Sequence: Synthetic oligonucleotide
gtctttctccacccccgggag

SEQ ID NO: 1181 - DNA, 21 bp, Artificial Sequence
  Description of Artificial Sequence: Synthetic oligonucleotide
ctccacccccgggagaccacg

SEQ ID NO: 1182 - DNA, 21 bp, Artificial Sequence
  Description of Artificial Sequence: Synthetic oligonucleotide
tccacccccgggagaccacga

SEQ ID NO: 1183 - DNA, 21 bp, Artificial Sequence
  Description of Artificial Sequence: Synthetic oligonucleotide
tatctacaacctggacgagag

SEQ ID NO: 1184 - DNA, 21 bp, Artificial Sequence
  Description of Artificial Sequence: Synthetic oligonucleotide
gatgtgcctgttctcaacctc

SEQ ID NO: 1185 - DNA, 21 bp, Artificial Sequence
  Description of Artificial Sequence: Synthetic oligonucleotide
atgtgcctgttctcaacctct

SEQ ID NO: 1186 - DNA, 21 bp, Artificial Sequence
  Description of Artificial Sequence: Synthetic oligonucleotide
tgcactgccagggacagcagt

SEQ ID NO: 1187 - DNA, 21 bp, Artificial Sequence
  Description of Artificial Sequence: Synthetic oligonucleotide
cctggacttctgcactgccag

SEQ ID NO: 1188 - DNA, 21 bp, Artificial Sequence
  Description of Artificial Sequence: Synthetic oligonucleotide
ctatcagtcccagggccgcca

SEQ ID NO: 1189 - DNA, 21 bp, Artificial Sequence
  Description of Artificial Sequence: Synthetic oligonucleotide
ggcccagtgggagtgaactga

SEQ ID NO: 1190 - DNA, 21 bp, Artificial Sequence
  Description of Artificial Sequence: Synthetic oligonucleotide
ttgggcccagtgggagtgaac

SEQ ID NO: 1191 - DNA, 21 bp, Artificial Sequence
  Description of Artificial Sequence: Synthetic oligonucleotide
ggtccggacgaactgctgctg

SEQ ID NO: 1192 - DNA, 21 bp, Artificial Sequence
  Description of Artificial Sequence: Synthetic oligonucleotide
atgggctcaaaggaggtagaa

SEQ ID NO: 1193 - DNA, 21 bp, Artificial Sequence
  Description of Artificial Sequence: Synthetic oligonucleotide
tgacagctctttggggagttc

SEQ ID NO: 1194 - DNA, 21 bp, Artificial Sequence
  Description of Artificial Sequence: Synthetic oligonucleotide
ctgacagctctttggggagtt

SEQ ID NO: 1195 - DNA, 21 bp, Artificial Sequence
  Description of Artificial Sequence: Synthetic oligonucleotide
tgaggacatcaactcctccag

SEQ ID NO: 1196 - DNA, 21 bp, Artificial Sequence
  Description of Artificial Sequence: Synthetic oligonucleotide
cagggccacccaccttctgag

SEQ ID NO: 1197 - DNA, 21 bp, Artificial Sequence
  Description of Artificial Sequence: Synthetic oligonucleotide
tagatataatcgtggtctccc

SEQ ID NO: 1198 - DNA, 21 bp, Artificial Sequence
  Description of Artificial Sequence: Synthetic oligonucleotide
actctcgtccaggttgtagat

SEQ ID NO: 1199 - DNA, 21 bp, Artificial Sequence
  Description of Artificial Sequence: Synthetic oligonucleotide
tgggggttcacccacttgtag

SEQ ID NO: 1200 - DNA, 21 bp, Artificial Sequence
  Description of Artificial Sequence: Synthetic oligonucleotide
acccacttgtaggtgccctca

SEQ ID NO: 1201 - DNA, 21 bp, Artificial Sequence
  Description of Artificial Sequence: Synthetic oligonucleotide
taggtgccctcatactggaaa

SEQ ID NO: 1202 - DNA, 21 bp, Artificial Sequence
  Description of Artificial Sequence: Synthetic oligonucleotide
atcagctcgtctgcctccgtg

SEQ ID NO: 1203 - DNA, 21 bp, Artificial Sequence
  Description of Artificial Sequence: Synthetic oligonucleotide
cctcacctgccataaatatag

SEQ ID NO: 1204 - DNA, 21 bp, Artificial Sequence
  Description of Artificial Sequence: Synthetic oligonucleotide
ctcacctgccataaatatagg

SEQ ID NO: 1205 - DNA, 21 bp, Artificial Sequence
  Description of Artificial Sequence: Synthetic oligonucleotide
ggcttctccagctcaatctgg

SEQ ID NO: 1206 - DNA, 21 bp, Artificial Sequence
  Description of Artificial Sequence: Synthetic oligonucleotide
tccagctcaatctggtgcagc

SEQ ID NO: 1207 - DNA, 21 bp, Artificial Sequence
  Description of Artificial Sequence: Synthetic oligonucleotide
tctgtagggcaccttgtatct

SEQ ID NO: 1208 - DNA, 21 bp, Artificial Sequence
  Description of Artificial Sequence: Synthetic oligonucleotide
tatctgttgccgtaggtcagg

SEQ ID NO: 1209 - DNA, 21 bp, Artificial Sequence
  Description of Artificial Sequence: Synthetic oligonucleotide
ccgtaggtcaggtccagctcc

SEQ ID NO: 1210 - DNA, 21 bp, Artificial Sequence
  Description of Artificial Sequence: Synthetic oligonucleotide
aagaacatgcccggcttcttg

SEQ ID NO: 1211 - DNA, 21 bp, Artificial Sequence
  Description of Artificial Sequence: Synthetic oligonucleotide
ttggtcatcatcttggtgtac

SEQ ID NO: 1212 - DNA, 21 bp, Artificial Sequence
  Description of Artificial Sequence: Synthetic oligonucleotide
gtcatcatcttggtgtacacg

SEQ ID NO: 1213 - DNA, 21 bp, Artificial Sequence
  Description of Artificial Sequence: Synthetic oligonucleotide
gtgtacacggcctcgttgggc

SEQ ID NO: 1214 - DNA, 21 bp, Artificial Sequence
  Description of Artificial Sequence: Synthetic oligonucleotide
ggctgcacgcggatcaccagc

SEQ ID NO: 1215 - DNA, 21 bp, Artificial Sequence
  Description of Artificial Sequence: Synthetic oligonucleotide
cgcttgcactgctggtggaag

SEQ ID NO: 1216 - DNA, 21 bp, Artificial Sequence
  Description of Artificial Sequence: Synthetic oligonucleotide
cactgctggtggaagatgtcg

SEQ ID NO: 1217 - DNA, 21 bp, Artificial Sequence
  Description of Artificial Sequence: Synthetic oligonucleotide
cgctcgttcagggccttgccg

SEQ ID NO: 1218 - DNA, 21 bp, Artificial Sequence
  Description of Artificial Sequence: Synthetic oligonucleotide
agggccttgccgcagcgcagg

SEQ ID NO: 1219 - DNA, 21 bp, Artificial Sequence
  Description of Artificial Sequence: Synthetic oligonucleotide
ccgcagcgcaggatgaagggc

SEQ ID NO: 1220 - DNA, 21 bp, Artificial Sequence
  Description of Artificial Sequence: Synthetic oligonucleotide
cagtatgagggcacctacaag

SEQ ID NO: 1221 - DNA, 21 bp, Artificial Sequence
  Description of Artificial Sequence: Synthetic oligonucleotide
ccagtatgagggcacctacaa

SEQ ID NO: 1222 - DNA, 21 bp, Artificial Sequence
  Description of Artificial Sequence: Synthetic oligonucleotide
agctggagaagcccaagccca

SEQ ID NO: 1223 - DNA, 21 bp, Artificial Sequence
  Description of Artificial Sequence: Synthetic oligonucleotide
accccactgctgcaccagatt

SEQ ID NO: 1224 - DNA, 21 bp, Artificial Sequence
  Description of Artificial Sequence: Synthetic oligonucleotide
caccccactgctgcaccagat

SEQ ID NO: 1225 - DNA, 21 bp, Artificial Sequence
  Description of Artificial Sequence: Synthetic oligonucleotide
tcaccccactgctgcaccaga

SEQ ID NO: 1226 - DNA, 21 bp, Artificial Sequence
  Description of Artificial Sequence: Synthetic oligonucleotide
tgcgggagccagatgcacttc

SEQ ID NO: 1227 - DNA, 21 bp, Artificial Sequence
  Description of Artificial Sequence: Synthetic oligonucleotide
aaccccgaggagtcggagctg

SEQ ID NO: 1228 - DNA, 21 bp, Artificial Sequence
  Description of Artificial Sequence: Synthetic oligonucleotide
ttcaaccccgaggagtcggag

SEQ ID NO: 1229 - DNA, 21 bp, Artificial Sequence
  Description of Artificial Sequence: Synthetic oligonucleotide
caccagcagtgcaagcgcaac

SEQ ID NO: 1230 - DNA, 21 bp, Artificial Sequence
  Description of Artificial Sequence: Synthetic oligonucleotide
catgatgtggccggcgacatc

SEQ ID NO: 1231 - DNA, 21 bp, Artificial Sequence
  Description of Artificial Sequence: Synthetic oligonucleotide
atcctgcgctgcggcaaggcc

SEQ ID NO: 1232 - DNA, 21 bp, Artificial Sequence
  Description of Artificial Sequence: Synthetic oligonucleotide
cgccacgtaggggtgcccttc

SEQ ID NO: 1233 - DNA, 21 bp, Artificial Sequence
  Description of Artificial Sequence: Synthetic oligonucleotide
ccgccacgtaggggtgccctt

SEQ ID NO: 1234 - DNA, 21 bp, Artificial Sequence
  Description of Artificial Sequence: Synthetic oligonucleotide
atgaagataaattgatagcac

SEQ ID NO: 1235 - DNA, 21 bp, Artificial Sequence
  Description of Artificial Sequence: Synthetic oligonucleotide
atagcacaaaatctagaactt

SEQ ID NO: 1236 - DNA, 21 bp, Artificial Sequence
  Description of Artificial Sequence: Synthetic oligonucleotide
atgaaaccataaaaattggtt

SEQ ID NO: 1237 - DNA, 21 bp, Artificial Sequence
  Description of Artificial Sequence: Synthetic oligonucleotide
gtttgactaagcttaattgct

SEQ ID NO: 1238 - DNA, 21 bp, Artificial Sequence
  Description of Artificial Sequence: Synthetic oligonucleotide
gactaagcttaattgctttct

SEQ ID NO: 1239 - DNA, 21 bp, Artificial Sequence
  Description of Artificial Sequence: Synthetic oligonucleotide
actaagcttaattgctttctg

SEQ ID NO: 1240 - DNA, 21 bp, Artificial Sequence
  Description of Artificial Sequence: Synthetic oligonucleotide
attgctttctggaacaggatc

SEQ ID NO: 1241 - DNA, 21 bp, Artificial Sequence
  Description of Artificial Sequence: Synthetic oligonucleotide
ctttctggaacaggatctgaa

SEQ ID NO: 1242 - DNA, 21 bp, Artificial Sequence
  Description of Artificial Sequence: Synthetic oligonucleotide
ctggaacaggatctgaaactg

SEQ ID NO: 1243 - DNA, 21 bp, Artificial Sequence
  Description of Artificial Sequence: Synthetic oligonucleotide
tggaacaggatctgaaactgg

SEQ ID NO: 1244 - DNA, 21 bp, Artificial Sequence
  Description of Artificial Sequence: Synthetic oligonucleotide
tctaatgtccgttaaaggtac

SEQ ID NO: 1245 - DNA, 21 bp, Artificial Sequence
  Description of Artificial Sequence: Synthetic oligonucleotide
aaggtacgacaccacagagga

SEQ ID NO: 1246 - DNA, 21 bp, Artificial Sequence
  Description of Artificial Sequence: Synthetic oligonucleotide
tttatacccatcaacactggt

SEQ ID NO: 1247 - DNA, 21 bp, Artificial Sequence
  Description of Artificial Sequence: Synthetic oligonucleotide
atacccatcaacactggtaag

SEQ ID NO: 1248 - DNA, 21 bp, Artificial Sequence
  Description of Artificial Sequence: Synthetic oligonucleotide
tacccatcaacactggtaaga

SEQ ID NO: 1249 - DNA, 21 bp, Artificial Sequence
  Description of Artificial Sequence: Synthetic oligonucleotide
atcagctgaaaaggaaacagc

SEQ ID NO: 1250 - DNA, 21 bp, Artificial Sequence
  Description of Artificial Sequence: Synthetic oligonucleotide
atgatgctaaactgttcagaa

SEQ ID NO: 1251 - DNA, 21 bp, Artificial Sequence
  Description of Artificial Sequence: Synthetic oligonucleotide
agaaaacaacaaagaagagac

SEQ ID NO: 1252 - DNA, 21 bp, Artificial Sequence
  Description of Artificial Sequence: Synthetic oligonucleotide
cttcttttaggatgtggatgt

SEQ ID NO: 1253 - DNA, 21 bp, Artificial Sequence
  Description of Artificial Sequence: Synthetic oligonucleotide
ttcttttaggatgtggatgta

SEQ ID NO: 1254 - DNA, 21 bp, Artificial Sequence
  Description of Artificial Sequence: Synthetic oligonucleotide
ttttaggatgtggatgtagaa

SEQ ID NO: 1255 - DNA, 21 bp, Artificial Sequence
  Description of Artificial Sequence: Synthetic oligonucleotide
taggatgtggatgtagaagag

SEQ ID NO: 1256 - DNA, 21 bp, Artificial Sequence
  Description of Artificial Sequence: Synthetic oligonucleotide
aggatgtggatgtagaagagg

SEQ ID NO: 1257 - DNA, 21 bp, Artificial Sequence
  Description of Artificial Sequence: Synthetic oligonucleotide
ggatgtggatgtagaagaggc

SEQ ID NO: 1258 - DNA, 21 bp, Artificial Sequence
  Description of Artificial Sequence: Synthetic oligonucleotide
tggggcagtatactgaagaac

SEQ ID NO: 1259 - DNA, 21 bp, Artificial Sequence
  Description of Artificial Sequence: Synthetic oligonucleotide
ttcatcaattggcggggttcc

SEQ ID NO: 1260 - DNA, 21 bp, Artificial Sequence
  Description of Artificial Sequence: Synthetic oligonucleotide
atcaattggcggggttccatt

SEQ ID NO: 1261 - DNA, 21 bp, Artificial Sequence
  Description of Artificial Sequence: Synthetic oligonucleotide
gcggggttccatttttccagg

SEQ ID NO: 1262 - DNA, 21 bp, Artificial Sequence
  Description of Artificial Sequence: Synthetic oligonucleotide
tcccgccttaaatccacagca

SEQ ID NO: 1263 - DNA, 21 bp, Artificial Sequence
  Description of Artificial Sequence: Synthetic oligonucleotide
cccgccttaaatccacagcat

SEQ ID NO: 1264 - DNA, 21 bp, Artificial Sequence
  Description of Artificial Sequence: Synthetic oligonucleotide
ccgccttaaatccacagcata

SEQ ID NO: 1265 - DNA, 21 bp, Artificial Sequence
  Description of Artificial Sequence: Synthetic oligonucleotide
aatccacagcataaaaaatca

SEQ ID NO: 1266 - DNA, 21 bp, Artificial Sequence
  Description of Artificial Sequence: Synthetic oligonucleotide
acacactggagaggtctaaag

SEQ ID NO: 1267 - DNA, 21 bp, Artificial Sequence
  Description of Artificial Sequence: Synthetic oligonucleotide
gttacaaagagcagattacct

SEQ ID NO: 1268 - DNA, 21 bp, Artificial Sequence
  Description of Artificial Sequence: Synthetic oligonucleotide
caaagagcagattacctctgc

SEQ ID NO: 1269 - DNA, 21 bp, Artificial Sequence
  Description of Artificial Sequence: Synthetic oligonucleotide
cctctgcgagcccagatcaac

SEQ ID NO: 1270 - DNA, 21 bp, Artificial Sequence
  Description of Artificial Sequence: Synthetic oligonucleotide
tagattttgtgctatcaattt

SEQ ID NO: 1271 - DNA, 21 bp, Artificial Sequence
  Description of Artificial Sequence: Synthetic oligonucleotide
agttctagattttgtgctatc

SEQ ID NO: 1272 - DNA, 21 bp, Artificial Sequence
  Description of Artificial Sequence: Synthetic oligonucleotide
attaagttctagattttgtgc

SEQ ID NO: 1273 - DNA, 21 bp, Artificial Sequence
  Description of Artificial Sequence: Synthetic oligonucleotide
cattaagttctagattttgtg

SEQ ID NO: 1274 - DNA, 21 bp, Artificial Sequence
  Description of Artificial Sequence: Synthetic oligonucleotide
tggtttcattaagttctagat

SEQ ID NO: 1275 - DNA, 21 bp, Artificial Sequence
  Description of Artificial Sequence: Synthetic oligonucleotide
atggtttcattaagttctaga

SEQ ID NO: 1276 - DNA, 21 bp, Artificial Sequence
  Description of Artificial Sequence: Synthetic oligonucleotide
tatggtttcattaagttctag

SEQ ID NO: 1277 - DNA, 21 bp, Artificial Sequence
  Description of Artificial Sequence: Synthetic oligonucleotide
ttatggtttcattaagttcta

SEQ ID NO: 1278 - DNA, 21 bp, Artificial Sequence
  Description of Artificial Sequence: Synthetic oligonucleotide
gtcaaaccaatttttatggtt

SEQ ID NO: 1279 - DNA, 21 bp, Artificial Sequence
  Description of Artificial Sequence: Synthetic oligonucleotide
agcttagtcaaaccaattttt

SEQ ID NO: 1280 - DNA, 21 bp, Artificial Sequence
  Description of Artificial Sequence: Synthetic oligonucleotide
cagaaagcaattaagcttagt

SEQ ID NO: 1281 - DNA, 21 bp, Artificial Sequence
  Description of Artificial Sequence: Synthetic oligonucleotide
agatcctgttccagaaagcaa

SEQ ID NO: 1282 - DNA, 21 bp, Artificial Sequence
  Description of Artificial Sequence: Synthetic oligonucleotide
cagatcctgttccagaaagca

SEQ ID NO: 1283 - DNA, 21 bp, Artificial Sequence
  Description of Artificial Sequence: Synthetic oligonucleotide
ggatatccagtttcagatcct

SEQ ID NO: 1284 - DNA, 21 bp, Artificial Sequence
  Description of Artificial Sequence: Synthetic oligonucleotide
aagtacctgttgggatatcca

SEQ ID NO: 1285 - DNA, 21 bp, Artificial Sequence
  Description of Artificial Sequence: Synthetic oligonucleotide
aaagtacctgttgggatatcc

SEQ ID NO: 1286 - DNA, 21 bp, Artificial Sequence
  Description of Artificial Sequence: Synthetic oligonucleotide
taaagtacctgttgggatatc

SEQ ID NO: 1287 - DNA, 21 bp, Artificial Sequence
  Description of Artificial Sequence: Synthetic oligonucleotide
tcttttaaagtacctgttggg

SEQ ID NO: 1288 - DNA, 21 bp, Artificial Sequence
  Description of Artificial Sequence: Synthetic oligonucleotide
ctcttttaaagtacctgttgg

SEQ ID NO: 1289 - DNA, 21 bp, Artificial Sequence
  Description of Artificial Sequence: Synthetic oligonucleotide
tatttctcttttaaagtacct

SEQ ID NO: 1290 - DNA, 21 bp, Artificial Sequence
  Description of Artificial Sequence: Synthetic oligonucleotide
ctctgtggtgtcgtaccttta

SEQ ID NO: 1291 - DNA, 21 bp, Artificial Sequence
  Description of Artificial Sequence: Synthetic oligonucleotide
cctctgtggtgtcgtaccttt

SEQ ID NO: 1292 - DNA, 21 bp, Artificial Sequence
  Description of Artificial Sequence: Synthetic oligonucleotide
tcctctgtggtgtcgtacctt

SEQ ID NO: 1293 - DNA, 21 bp, Artificial Sequence
  Description of Artificial Sequence: Synthetic oligonucleotide
atgggtataaataacttttcc

SEQ ID NO: 1294 - DNA, 21 bp, Artificial Sequence
  Description of Artificial Sequence: Synthetic oligonucleotide
ccagtgttgatgggtataaat

SEQ ID NO: 1295 - DNA, 21 bp, Artificial Sequence
  Description of Artificial Sequence: Synthetic oligonucleotide
ttaccagtgttgatgggtata

SEQ ID NO: 1296 - DNA, 21 bp, Artificial Sequence
  Description of Artificial Sequence: Synthetic oligonucleotide
agttcttaccagtgttgatgg

SEQ ID NO: 1297 - DNA, 21 bp, Artificial Sequence
  Description of Artificial Sequence: Synthetic oligonucleotide
acgtggttcagttcttaccag

SEQ ID NO: 1298 - DNA, 21 bp, Artificial Sequence
  Description of Artificial Sequence: Synthetic oligonucleotide
agctgatcaaggagatgttca

SEQ ID NO: 1299 - DNA, 21 bp, Artificial Sequence
  Description of Artificial Sequence: Synthetic oligonucleotide
cagctgatcaaggagatgttc

SEQ ID NO: 1300 - DNA, 21 bp, Artificial Sequence
  Description of Artificial Sequence: Synthetic oligonucleotide
tcagctgatcaaggagatgtt

SEQ ID NO: 1301 - DNA, 21 bp, Artificial Sequence
  Description of Artificial Sequence: Synthetic oligonucleotide
cttttcagctgatcaaggaga

SEQ ID NO: 1302 - DNA, 21 bp, Artificial Sequence
  Description of Artificial Sequence: Synthetic oligonucleotide
ccttttcagctgatcaaggag

SEQ ID NO: 1303 - DNA, 21 bp, Artificial Sequence
  Description of Artificial Sequence: Synthetic oligonucleotide
acagctcaggctgtttccttt

SEQ ID NO: 1304 - DNA, 21 bp, Artificial Sequence
  Description of Artificial Sequence: Synthetic oligonucleotide
gcatcattaacagctcaggct

SEQ ID NO: 1305 - DNA, 21 bp, Artificial Sequence
  Description of Artificial Sequence: Synthetic oligonucleotide
agcatcattaacagctcaggc

SEQ ID NO: 1306 - DNA, 21 bp, Artificial Sequence
  Description of Artificial Sequence: Synthetic oligonucleotide
tgaacagtttagcatcattaa

SEQ ID NO: 1307 - DNA, 21 bp, Artificial Sequence
  Description of Artificial Sequence: Synthetic oligonucleotide
ctgaacagtttagcatcatta

SEQ ID NO: 1308 - DNA, 21 bp, Artificial Sequence
  Description of Artificial Sequence: Synthetic oligonucleotide
tctgaacagtttagcatcatt

SEQ ID NO: 1309 - DNA, 21 bp, Artificial Sequence
  Description of Artificial Sequence: Synthetic oligonucleotide
ttttctgaacagtttagcatc

SEQ ID NO: 1310 - DNA, 21 bp, Artificial Sequence
  Description of Artificial Sequence: Synthetic oligonucleotide
ttgttttctgaacagtttagc

SEQ ID NO: 1311 - DNA, 21 bp, Artificial Sequence
  Description of Artificial Sequence: Synthetic oligonucleotide
tttgttgttttctgaacagtt

SEQ ID NO: 1312 - DNA, 21 bp, Artificial Sequence
  Description of Artificial Sequence: Synthetic oligonucleotide
tctcttctttgttgttttctg

SEQ ID NO: 1313 - DNA, 21 bp, Artificial Sequence
  Description of Artificial Sequence: Synthetic oligonucleotide
ccggaattgtctcttctttgt

SEQ ID NO: 1314 - DNA, 21 bp, Artificial Sequence
  Description of Artificial Sequence: Synthetic oligonucleotide
accggaattgtctcttctttg

SEQ ID NO: 1315 - DNA, 21 bp, Artificial Sequence
  Description of Artificial Sequence: Synthetic oligonucleotide
aatttaccggaattgtctctt

SEQ ID NO: 1316 - DNA, 21 bp, Artificial Sequence
  Description of Artificial Sequence: Synthetic oligonucleotide
aaatttaccggaattgtctct

SEQ ID NO: 1317 - DNA, 21 bp, Artificial Sequence
  Description of Artificial Sequence: Synthetic oligonucleotide
agtatactgccccagaactgc

SEQ ID NO: 1318 - DNA, 21 bp, Artificial Sequence
  Description of Artificial Sequence: Synthetic oligonucleotide
ttcagtatactgccccagaac

SEQ ID NO: 1319 - DNA, 21 bp, Artificial Sequence
  Description of Artificial Sequence: Synthetic oligonucleotide
gaggttcttcagtatactgcc

SEQ ID NO: 1320 - DNA, 21 bp, Artificial Sequence
  Description of Artificial Sequence: Synthetic oligonucleotide
acttagaggttcttcagtata

SEQ ID NO: 1321 - DNA, 21 bp, Artificial Sequence
  Description of Artificial Sequence: Synthetic oligonucleotide
atgaacaatccacaccagcat

SEQ ID NO: 1322 - DNA, 21 bp, Artificial Sequence
  Description of Artificial Sequence: Synthetic oligonucleotide
tctgatatgacatacctggaa

SEQ ID NO: 1323 - DNA, 21 bp, Artificial Sequence
  Description of Artificial Sequence: Synthetic oligonucleotide
catgtgattttttatgctgtg

SEQ ID NO: 1324 - DNA, 21 bp, Artificial Sequence
  Description of Artificial Sequence: Synthetic oligonucleotide
ccatgtgattttttatgctgt

SEQ ID NO: 1325 - DNA, 21 bp, Artificial Sequence
  Description of Artificial Sequence: Synthetic oligonucleotide
tccatgtgattttttatgctg

SEQ ID NO: 1326 - DNA, 21 bp, Artificial Sequence
  Description of Artificial Sequence: Synthetic oligonucleotide
tcttttccatgtgatttttta

SEQ ID NO: 1327 - DNA, 21 bp, Artificial Sequence
  Description of Artificial Sequence: Synthetic oligonucleotide
gtcttttccatgtgatttttt

SEQ ID NO: 1328 - DNA, 21 bp, Artificial Sequence
  Description of Artificial Sequence: Synthetic oligonucleotide
tttgtcttttccatgtgattt

SEQ ID NO: 1329 - DNA, 21 bp, Artificial Sequence
  Description of Artificial Sequence: Synthetic oligonucleotide
ctttgtcttttccatgtgatt

SEQ ID NO: 1330 - DNA, 21 bp, Artificial Sequence
  Description of Artificial Sequence: Synthetic oligonucleotide
tctttgtcttttccatgtgat

SEQ ID NO: 1331 - DNA, 21 bp, Artificial Sequence
  Description of Artificial Sequence: Synthetic oligonucleotide
atgcctctgttttctttgtct

SEQ ID NO: 1332 - DNA, 21 bp, Artificial Sequence
  Description of Artificial Sequence: Synthetic oligonucleotide
gacctctccagtgtgttaatg

SEQ ID NO: 1333 - DNA, 21 bp, Artificial Sequence
  Description of Artificial Sequence: Synthetic oligonucleotide
agacctctccagtgtgttaat

SEQ ID NO: 1334 - DNA, 21 bp, Artificial Sequence
  Description of Artificial Sequence: Synthetic oligonucleotide
cactttagacctctccagtgt

SEQ ID NO: 1335 - DNA, 21 bp, Artificial Sequence
  Description of Artificial Sequence: Synthetic oligonucleotide
ttccactttagacctctccag

SEQ ID NO: 1336 - DNA, 21 bp, Artificial Sequence
  Description of Artificial Sequence: Synthetic oligonucleotide
cttccactttagacctctcca

SEQ ID NO: 1337 - DNA, 21 bp, Artificial Sequence
  Description of Artificial Sequence: Synthetic oligonucleotide
taaccaagtgctctgtagttt

SEQ ID NO: 1338 - DNA, 21 bp, Artificial Sequence
  Description of Artificial Sequence: Synthetic oligonucleotide
gtaaccaagtgctctgtagtt

SEQ ID NO: 1339 - DNA, 21 bp, Artificial Sequence
  Description of Artificial Sequence: Synthetic oligonucleotide
atctgggctcgcagaggtaat

SEQ ID NO: 1340 - DNA, 21 bp, Artificial Sequence
  Description of Artificial Sequence: Synthetic oligonucleotide
aaggttgatctgggctcgcag

SEQ ID NO: 1341 - DNA, 21 bp, Artificial Sequence
  Description of Artificial Sequence: Synthetic oligonucleotide
ccaacccccaagtgaattaaa

SEQ ID NO: 1342 - DNA, 21 bp, Artificial Sequence
  Description of Artificial Sequence: Synthetic oligonucleotide
tgcagaccacagtccatgcca

SEQ ID NO: 1343 - DNA, 21 bp, Artificial Sequence
  Description of Artificial Sequence: Synthetic oligonucleotide
gcagaccacagtccatgccat

SEQ ID NO: 1344 - DNA, 21 bp, Artificial Sequence
  Description of Artificial Sequence: Synthetic oligonucleotide
cagaccacagtccatgccatc

SEQ ID NO: 1345 - DNA, 21 bp, Artificial Sequence
  Description of Artificial Sequence: Synthetic oligonucleotide
tcatcttctaggtatgacaac

SEQ ID NO: 1346 - DNA, 21 bp, Artificial Sequence
  Description of Artificial Sequence: Synthetic oligonucleotide
catcttctaggtatgacaacg

SEQ ID NO: 1347 - DNA, 21 bp, Artificial Sequence
  Description of Artificial Sequence: Synthetic oligonucleotide
atcttctaggtatgacaacga

SEQ ID NO: 1348 - DNA, 21 bp, Artificial Sequence
  Description of Artificial Sequence: Synthetic oligonucleotide
taggtatgacaacgaatttgg

SEQ ID NO: 1349 - DNA, 21 bp, Artificial Sequence
  Description of Artificial Sequence: Synthetic oligonucleotide
cccagctctcataccatgagt

SEQ ID NO: 1350 - DNA, 21 bp, Artificial Sequence
  Description of Artificial Sequence: Synthetic oligonucleotide
tatccacagtgaatcttggtt

SEQ ID NO: 1351 - DNA, 21 bp, Artificial Sequence
  Description of Artificial Sequence: Synthetic oligonucleotide
gttgtaaacttgacctaaaga

SEQ ID NO: 1352 - DNA, 21 bp, Artificial Sequence
  Description of Artificial Sequence: Synthetic oligonucleotide
taaacttgacctaaagaccat

SEQ ID NO: 1353 - DNA, 21 bp, Artificial Sequence
  Description of Artificial Sequence: Synthetic oligonucleotide
acctaaagaccattgcacttc

SEQ ID NO: 1354 - DNA, 21 bp, Artificial Sequence
  Description of Artificial Sequence: Synthetic oligonucleotide
cacttcgtgcccgaaacgccg

SEQ ID NO: 1355 - DNA, 21 bp, Artificial Sequence
  Description of Artificial Sequence: Synthetic oligonucleotide
gtgcccgaaacgccgaatata

SEQ ID NO: 1356 - DNA, 21 bp, Artificial Sequence
  Description of Artificial Sequence: Synthetic oligonucleotide
tctctgaccattgtagcggtt

SEQ ID NO: 1357 - DNA, 21 bp, Artificial Sequence
  Description of Artificial Sequence: Synthetic oligonucleotide
tagcggtttgctgcggtaatc

SEQ ID NO: 1358 - DNA, 21 bp, Artificial Sequence
  Description of Artificial Sequence: Synthetic oligonucleotide
gctgcggtaatcatgaggata

SEQ ID NO: 1359 - DNA, 21 bp, Artificial Sequence
  Description of Artificial Sequence: Synthetic oligonucleotide
ctgcggtaatcatgaggataa

SEQ ID NO: 1360 - DNA, 21 bp, Artificial Sequence
  Description of Artificial Sequence: Synthetic oligonucleotide
tcagttctgggaaaatggtgt

SEQ ID NO: 1361 - DNA, 21 bp, Artificial Sequence
  Description of Artificial Sequence: Synthetic oligonucleotide
cagttctgggaaaatggtgtg

SEQ ID NO: 1362 - DNA, 21 bp, Artificial Sequence
  Description of Artificial Sequence: Synthetic oligonucleotide
agttctgggaaaatggtgtgc

SEQ ID NO: 1363 - DNA, 21 bp, Artificial Sequence
  Description of Artificial Sequence: Synthetic oligonucleotide
tgggaaaatggtgtgcacagg

SEQ ID NO: 1364 - DNA, 21 bp, Artificial Sequence
  Description of Artificial Sequence: Synthetic oligonucleotide
tttcctttccctagtgaagaa

SEQ ID NO: 1365 - DNA, 21 bp, Artificial Sequence
  Description of Artificial Sequence: Synthetic oligonucleotide
ttcctttccctagtgaagaac

SEQ ID NO: 1366 - DNA, 21 bp, Artificial Sequence
  Description of Artificial Sequence: Synthetic oligonucleotide
tcctttccctagtgaagaaca

SEQ ID NO: 1367 - DNA, 21 bp, Artificial Sequence
  Description of Artificial Sequence: Synthetic oligonucleotide
cctttccctagtgaagaacag

SEQ ID NO: 1368 - DNA, 21 bp, Artificial Sequence
  Description of Artificial Sequence: Synthetic oligonucleotide
ctttccctagtgaagaacagt

SEQ ID NO: 1369 - DNA, 21 bp, Artificial Sequence
  Description of Artificial Sequence: Synthetic oligonucleotide
ccctagtgaagaacagtccag

SEQ ID NO: 1370 - DNA, 21 bp, Artificial Sequence
  Description of Artificial Sequence: Synthetic oligonucleotide
cctagtgaagaacagtccaga

SEQ ID NO: 1371 - DNA, 21 bp, Artificial Sequence
  Description of Artificial Sequence: Synthetic oligonucleotide
tacagaagttgggttttccag

SEQ ID NO: 1372 - DNA, 21 bp, Artificial Sequence
  Description of Artificial Sequence: Synthetic oligonucleotide
ggttttccagctaagttcttg

SEQ ID NO: 1373 - DNA, 21 bp, Artificial Sequence
  Description of Artificial Sequence: Synthetic oligonucleotide
tccagctaagttcttggactt

SEQ ID NO: 1374 - DNA, 21 bp, Artificial Sequence
  Description of Artificial Sequence: Synthetic oligonucleotide
ccagctaagttcttggacttc

SEQ ID NO: 1375 - DNA, 21 bp, Artificial Sequence
  Description of Artificial Sequence: Synthetic oligonucleotide
cagctaagttcttggacttca

SEQ ID NO: 1376 - DNA, 21 bp, Artificial Sequence
  Description of Artificial Sequence: Synthetic oligonucleotide
ttggacttcaagattcagaat

SEQ ID NO: 1377 - DNA, 21 bp, Artificial Sequence
  Description of Artificial Sequence: Synthetic oligonucleotide
gacttcaagattcagaatatg

SEQ ID NO: 1378 - DNA, 21 bp, Artificial Sequence
  Description of Artificial Sequence: Synthetic oligonucleotide
aagattcagaatatggtgggg

SEQ ID NO: 1379 - DNA, 21 bp, Artificial Sequence
  Description of Artificial Sequence: Synthetic oligonucleotide
agaatatggtggggagctgtg

SEQ ID NO: 1380 - DNA, 21 bp, Artificial Sequence
  Description of Artificial Sequence: Synthetic oligonucleotide
cctataaggttagaaggcctt

SEQ ID NO: 1381 - DNA, 21 bp, Artificial Sequence
  Description of Artificial Sequence: Synthetic oligonucleotide
ctataaggttagaaggccttg

SEQ ID NO: 1382 - DNA, 21 bp, Artificial Sequence
  Description of Artificial Sequence: Synthetic oligonucleotide
tgctcacccaccaacaattta

SEQ ID NO: 1383 - DNA, 21 bp, Artificial Sequence
  Description of Artificial Sequence: Synthetic oligonucleotide
ttgcaattttccttctagtta

SEQ ID NO: 1384 - DNA, 21 bp, Artificial Sequence
  Description of Artificial Sequence: Synthetic oligonucleotide
tgcaattttccttctagttat

SEQ ID NO: 1385 - DNA, 21 bp, Artificial Sequence
  Description of Artificial Sequence: Synthetic oligonucleotide
gcaattttccttctagttatg

SEQ ID NO: 1386 - DNA, 21 bp, Artificial Sequence
  Description of Artificial Sequence: Synthetic oligonucleotide
caattttccttctagttatga

SEQ ID NO: 1387 - DNA, 21 bp, Artificial Sequence
  Description of Artificial Sequence: Synthetic oligonucleotide
tccttctagttatgagccaga

SEQ ID NO: 1388 - DNA, 21 bp, Artificial Sequence
  Description of Artificial Sequence: Synthetic oligonucleotide
ccttctagttatgagccagag

SEQ ID NO: 1389 - DNA, 21 bp, Artificial Sequence
  Description of Artificial Sequence: Synthetic oligonucleotide
cttctagttatgagccagagt

SEQ ID NO: 1390 - DNA, 21 bp, Artificial Sequence
  Description of Artificial Sequence: Synthetic oligonucleotide
tagttatgagccagagttatt

SEQ ID NO: 1391 - DNA, 21 bp, Artificial Sequence
  Description of Artificial Sequence: Synthetic oligonucleotide
tgagccagagttatttcctgg

SEQ ID NO: 1392 - DNA, 21 bp, Artificial Sequence
  Description of Artificial Sequence: Synthetic oligonucleotide
cctggtttaatctacagaatg

SEQ ID NO: 1393 - DNA, 21 bp, Artificial Sequence
  Description of Artificial Sequence: Synthetic oligonucleotide
ctggtttaatctacagaatga

SEQ ID NO: 1394 - DNA, 21 bp, Artificial Sequence
  Description of Artificial Sequence: Synthetic oligonucleotide
aatctacagaatgatcaaacc

SEQ ID NO: 1395 - DNA, 21 bp, Artificial Sequence
  Description of Artificial Sequence: Synthetic oligonucleotide
atctacagaatgatcaaaccc

SEQ ID NO: 1396 - DNA, 21 bp, Artificial Sequence
  Description of Artificial Sequence: Synthetic oligonucleotide
ttctccttatttttgtttctg

SEQ ID NO: 1397 - DNA, 21 bp, Artificial Sequence
  Description of Artificial Sequence: Synthetic oligonucleotide
tccttatttttgtttctggaa

SEQ ID NO: 1398 - DNA, 21 bp, Artificial Sequence
  Description of Artificial Sequence: Synthetic oligonucleotide
tttttgtttctggaaaagttg

SEQ ID NO: 1399 - DNA, 21 bp, Artificial Sequence
  Description of Artificial Sequence: Synthetic oligonucleotide
ttgtttctggaaaagttgtat

SEQ ID NO: 1400 - DNA, 21 bp, Artificial Sequence
  Description of Artificial Sequence: Synthetic oligonucleotide
tgtttctggaaaagttgtatt

SEQ ID NO: 1401 - DNA, 21 bp, Artificial Sequence
  Description of Artificial Sequence: Synthetic oligonucleotide
gtttctggaaaagttgtatta

SEQ ID NO: 1402 - DNA, 21 bp, Artificial Sequence
  Description of Artificial Sequence: Synthetic oligonucleotide
tttctggaaaagttgtattaa

SEQ ID NO: 1403 - DNA, 21 bp, Artificial Sequence
  Description of Artificial Sequence: Synthetic oligonucleotide
ctggaaaagttgtattaacag

SEQ ID NO: 1404 - DNA, 21 bp, Artificial Sequence
  Description of Artificial Sequence: Synthetic oligonucleotide
tggaaaagttgtattaacagg

SEQ ID NO: 1405 - DNA, 21 bp, Artificial Sequence
  Description of Artificial Sequence: Synthetic oligonucleotide
tcttcttaggtgctaaagtca

SEQ ID NO: 1406 - DNA, 21 bp, Artificial Sequence
  Description of Artificial Sequence: Synthetic oligonucleotide
ttaggtgctaaagtcagagca

SEQ ID NO: 1407 - DNA, 21 bp, Artificial Sequence
  Description of Artificial Sequence: Synthetic oligonucleotide
ggtgctaaagtcagagcagaa

SEQ ID NO: 1408 - DNA, 21 bp, Artificial Sequence
  Description of Artificial Sequence: Synthetic oligonucleotide
taaagggattcaggaagacga

SEQ ID NO: 1409 - DNA, 21 bp, Artificial Sequence
  Description of Artificial Sequence: Synthetic oligonucleotide
ggtcaagtttacaaccaagat

SEQ ID NO: 1410 - DNA, 21 bp, Artificial Sequence
  Description of Artificial Sequence: Synthetic oligonucleotide
aggtcaagtttacaaccaaga

SEQ ID NO: 1411 - DNA, 21 bp, Artificial Sequence
  Description of Artificial Sequence: Synthetic oligonucleotide
gggcacgaagtgcaatggtct

SEQ ID NO: 1412 - DNA, 21 bp, Artificial Sequence
  Description of Artificial Sequence: Synthetic oligonucleotide
cgggcacgaagtgcaatggtc

SEQ ID NO: 1413 - DNA, 21 bp, Artificial Sequence
  Description of Artificial Sequence: Synthetic oligonucleotide
ggcgtttcgggcacgaagtgc

SEQ ID NO: 1414 - DNA, 21 bp, Artificial Sequence
  Description of Artificial Sequence: Synthetic oligonucleotide
tattcggcgtttcgggcacga

SEQ ID NO: 1415 - DNA, 21 bp, Artificial Sequence
  Description of Artificial Sequence: Synthetic oligonucleotide
ggattatattcggcgtttcgg

SEQ ID NO: 1416 - DNA, 21 bp, Artificial Sequence
  Description of Artificial Sequence: Synthetic oligonucleotide
aaatagatctaaccttgggat

SEQ ID NO: 1417 - DNA, 21 bp, Artificial Sequence
  Description of Artificial Sequence: Synthetic oligonucleotide
tcctcatgattaccgcagcaa

SEQ ID NO: 1418 - DNA, 21 bp, Artificial Sequence
  Description of Artificial Sequence: Synthetic oligonucleotide
gtggctctcttatcctcatga

SEQ ID NO: 1419 - DNA, 21 bp, Artificial Sequence
  Description of Artificial Sequence: Synthetic oligonucleotide
ccagaactgaaaatcagtgcc

SEQ ID NO: 1420 - DNA, 21 bp, Artificial Sequence
  Description of Artificial Sequence: Synthetic oligonucleotide
cccagaactgaaaatcagtgc

SEQ ID NO: 1421 - DNA, 21 bp, Artificial Sequence
  Description of Artificial Sequence: Synthetic oligonucleotide
tcccagaactgaaaatcagtg

SEQ ID NO: 1422 - DNA, 21 bp, Artificial Sequence
  Description of Artificial Sequence: Synthetic oligonucleotide
gctcctgtgcacaccattttc

SEQ ID NO: 1423 - DNA, 21 bp, Artificial Sequence
  Description of Artificial Sequence: Synthetic oligonucleotide
cggctacctcttggctcctgt

SEQ ID NO: 1424 - DNA, 21 bp, Artificial Sequence
  Description of Artificial Sequence: Synthetic oligonucleotide
ttacggctacctcttggctcc

SEQ ID NO: 1425 - DNA, 21 bp, Artificial Sequence
  Description of Artificial Sequence: Synthetic oligonucleotide
cttacggctacctcttggctc

SEQ ID NO: 1426 - DNA, 21 bp, Artificial Sequence
  Description of Artificial Sequence: Synthetic oligonucleotide
ctgccagtctggactgttctt

SEQ ID NO: 1427 - DNA, 21 bp, Artificial Sequence
  Description of Artificial Sequence: Synthetic oligonucleotide
ttgctgccagtctggactgtt

SEQ ID NO: 1428 - DNA, 21 bp, Artificial Sequence
  Description of Artificial Sequence: Synthetic oligonucleotide
cttgctgccagtctggactgt

SEQ ID NO: 1429 - DNA, 21 bp, Artificial Sequence
  Description of Artificial Sequence: Synthetic oligonucleotide
tcttgctgccagtctggactg

SEQ ID NO: 1430 - DNA, 21 bp, Artificial Sequence
  Description of Artificial Sequence: Synthetic oligonucleotide
tgtacaactctagcatatttt

SEQ ID NO: 1431 - DNA, 21 bp, Artificial Sequence
  Description of Artificial Sequence: Synthetic oligonucleotide
gctggaaaacccaacttctgt

SEQ ID NO: 1432 - DNA, 21 bp, Artificial Sequence
  Description of Artificial Sequence: Synthetic oligonucleotide
aagtccaagaacttagctgga

SEQ ID NO: 1433 - DNA, 21 bp, Artificial Sequence
  Description of Artificial Sequence: Synthetic oligonucleotide
tgaatcttgaagtccaagaac

SEQ ID NO: 1434 - DNA, 21 bp, Artificial Sequence
  Description of Artificial Sequence: Synthetic oligonucleotide
acatcacagctccccaccata

SEQ ID NO: 1435 - DNA, 21 bp, Artificial Sequence
  Description of Artificial Sequence: Synthetic oligonucleotide
taaccttataggaaacttcac

SEQ ID NO: 1436 - DNA, 21 bp, Artificial Sequence
  Description of Artificial Sequence: Synthetic oligonucleotide
gtgggtgagcacaaggccttc

SEQ ID NO: 1437 - DNA, 21 bp, Artificial Sequence
  Description of Artificial Sequence: Synthetic oligonucleotide
ttggtgggtgagcacaaggcc

SEQ ID NO: 1438 - DNA, 21 bp, Artificial Sequence
  Description of Artificial Sequence: Synthetic oligonucleotide
cctactaaattgttggtgggt

SEQ ID NO: 1439 - DNA, 21 bp, Artificial Sequence
  Description of Artificial Sequence: Synthetic oligonucleotide
agacttacctactaaattgtt

SEQ ID NO: 1440 - DNA, 21 bp, Artificial Sequence
  Description of Artificial Sequence: Synthetic oligonucleotide
cagacttacctactaaattgt

SEQ ID NO: 1441 - DNA, 21 bp, Artificial Sequence
  Description of Artificial Sequence: Synthetic oligonucleotide
aaccaggaaataactctggct

SEQ ID NO: 1442 - DNA, 21 bp, Artificial Sequence
  Description of Artificial Sequence: Synthetic oligonucleotide
tgtagattaaaccaggaaata

SEQ ID NO: 1443 - DNA, 21 bp, Artificial Sequence
  Description of Artificial Sequence: Synthetic oligonucleotide
atcattctgtagattaaacca

SEQ ID NO: 1444 - DNA, 21 bp, Artificial Sequence
  Description of Artificial Sequence: Synthetic oligonucleotide
gatcattctgtagattaaacc

SEQ ID NO: 1445 - DNA, 21 bp, Artificial Sequence
  Description of Artificial Sequence: Synthetic oligonucleotide
tgggtttgatcattctgtaga

SEQ ID NO: 1446 - DNA, 21 bp, Artificial Sequence
  Description of Artificial Sequence: Synthetic oligonucleotide
cagaaacaaaaataaggagaa

SEQ ID NO: 1447 - DNA, 21 bp, Artificial Sequence
  Description of Artificial Sequence: Synthetic oligonucleotide
ccagaaacaaaaataaggaga

SEQ ID NO: 1448 - DNA, 21 bp, Artificial Sequence
  Description of Artificial Sequence: Synthetic oligonucleotide
tccagaaacaaaaataaggag

SEQ ID NO: 1449 - DNA, 21 bp, Artificial Sequence
  Description of Artificial Sequence: Synthetic oligonucleotide
atacaacttttccagaaacaa

SEQ ID NO: 1450 - DNA, 21 bp, Artificial Sequence
  Description of Artificial Sequence: Synthetic oligonucleotide
cctgttaatacaacttttcca

SEQ ID NO: 1451 - DNA, 21 bp, Artificial Sequence
  Description of Artificial Sequence: Synthetic oligonucleotide
caacttacctgttaatacaac

SEQ ID NO: 1452 - DNA, 21 bp, Artificial Sequence
  Description of Artificial Sequence: Synthetic oligonucleotide
ctgttacaacttacctgttaa

SEQ ID NO: 1453 - DNA, 21 bp, Artificial Sequence
  Description of Artificial Sequence: Synthetic oligonucleotide
ataaatttctgctctgacttt

SEQ ID NO: 1454 - DNA, 21 bp, Artificial Sequence
  Description of Artificial Sequence: Synthetic oligonucleotide
aaatgcttcataaatttctgc

SEQ ID NO: 1455 - DNA, 21 bp, Artificial Sequence
  Description of Artificial Sequence: Synthetic oligonucleotide
caaatgcttcataaatttctg

SEQ ID NO: 1456 - DNA, 21 bp, Artificial Sequence
  Description of Artificial Sequence: Synthetic oligonucleotide
tcaaatgcttcataaatttct

SEQ ID NO: 1457 - DNA, 21 bp, Artificial Sequence
  Description of Artificial Sequence: Synthetic oligonucleotide
ctgaatccctttagaataggg

SEQ ID NO: 1458 - DNA, 21 bp, Artificial Sequence
  Description of Artificial Sequence: Synthetic oligonucleotide
cgtcgtcttcctgaatccctt

SEQ ID NO: 1459 - DNA, 21 bp, Artificial Sequence
  Description of Artificial Sequence: Synthetic oligonucleotide
gggggctatcattgtagtgag

SEQ ID NO: 1460 - DNA, 21 bp, Artificial Sequence
  Description of Artificial Sequence: Synthetic oligonucleotide
ggggctatcattgtagtgagt

SEQ ID NO: 1461 - DNA, 21 bp, Artificial Sequence
  Description of Artificial Sequence: Synthetic oligonucleotide
tagtgagtggcggccctggga

SEQ ID NO: 1462 - DNA, 21 bp, Artificial Sequence
  Description of Artificial Sequence: Synthetic oligonucleotide
actcccactgggcccaacaac

SEQ ID NO: 1463 - DNA, 21 bp, Artificial Sequence
  Description of Artificial Sequence: Synthetic oligonucleotide
tgccctgctggacagcagcag

SEQ ID NO: 1464 - DNA, 21 bp, Artificial Sequence
  Description of Artificial Sequence: Synthetic oligonucleotide
gtccggacccaacccttctac

SEQ ID NO: 1465 - DNA, 21 bp, Artificial Sequence
  Description of Artificial Sequence: Synthetic oligonucleotide
tacctcctttgagcccatcaa

SEQ ID NO: 1466 - DNA, 21 bp, Artificial Sequence
  Description of Artificial Sequence: Synthetic oligonucleotide
gagcccatcaaggcagacccc

SEQ ID NO: 1467 - DNA, 21 bp, Artificial Sequence
  Description of Artificial Sequence: Synthetic oligonucleotide
agcccatcaaggcagacccca

SEQ ID NO: 1468 - DNA, 21 bp, Artificial Sequence
  Description of Artificial Sequence: Synthetic oligonucleotide
cttgtttttcagttttggaac

SEQ ID NO: 1469 - DNA, 21 bp, Artificial Sequence
  Description of Artificial Sequence: Synthetic oligonucleotide
tttttcagttttggaactccc

SEQ ID NO: 1470 - DNA, 21 bp, Artificial Sequence
  Description of Artificial Sequence: Synthetic oligonucleotide
ttcagttttggaactccccaa

SEQ ID NO: 1471 - DNA, 21 bp, Artificial Sequence
  Description of Artificial Sequence: Synthetic oligonucleotide
tcagttttggaactccccaaa

SEQ ID NO: 1472 - DNA, 21 bp, Artificial Sequence
  Description of Artificial Sequence: Synthetic oligonucleotide
cagttttggaactccccaaag

SEQ ID NO: 1473 - DNA, 21 bp, Artificial Sequence
  Description of Artificial Sequence: Synthetic oligonucleotide
agttttggaactccccaaaga

SEQ ID NO: 1474 - DNA, 21 bp, Artificial Sequence
  Description of Artificial Sequence: Synthetic oligonucleotide
tggaactccccaaagagctgt

SEQ ID NO: 1475 - DNA, 21 bp, Artificial Sequence
  Description of Artificial Sequence: Synthetic oligonucleotide
ggaactccccaaagagctgtc

SEQ ID NO: 1476 - DNA, 21 bp, Artificial Sequence
  Description of Artificial Sequence: Synthetic oligonucleotide
ccagagtgcatgagctcggag

SEQ ID NO: 1477 - DNA, 21 bp, Artificial Sequence
  Description of Artificial Sequence: Synthetic oligonucleotide
gcccctctgcttcgtctttct

SEQ ID NO: 1478 - DNA, 21 bp, Artificial Sequence
  Description of Artificial Sequence: Synthetic oligonucleotide
cccctctgcttcgtctttctc

SEQ ID NO: 1479 - DNA, 21 bp, Artificial Sequence
  Description of Artificial Sequence: Synthetic oligonucleotide
gtctttctccacccccgggag

SEQ ID NO: 1480 - DNA, 21 bp, Artificial Sequence
  Description of Artificial Sequence: Synthetic oligonucleotide
ctccacccccgggagaccacg

SEQ ID NO: 1481 - DNA, 21 bp, Artificial Sequence
  Description of Artificial Sequence: Synthetic oligonucleotide
tccacccccgggagaccacga

SEQ ID NO: 1482 - DNA, 21 bp, Artificial Sequence
  Description of Artificial Sequence: Synthetic oligonucleotide
tatctacaacctggacgagag

SEQ ID NO: 1483 - DNA, 21 bp, Artificial Sequence
  Description of Artificial Sequence: Synthetic oligonucleotide
gatgtgcctgttctcaacctc

SEQ ID NO: 1484 - DNA, 21 bp, Artificial Sequence
  Description of Artificial Sequence: Synthetic oligonucleotide
atgtgcctgttctcaacctct

SEQ ID NO: 1485 - DNA, 21 bp, Artificial Sequence
  Description of Artificial Sequence: Synthetic oligonucleotide
tgcactgccagggacagcagt

SEQ ID NO: 1486 - DNA, 21 bp, Artificial Sequence
  Description of Artificial Sequence: Synthetic oligonucleotide
cctggacttctgcactgccag

SEQ ID NO: 1487 - DNA, 21 bp, Artificial Sequence
  Description of Artificial Sequence: Synthetic oligonucleotide
ctatcagtcccagggccgcca

SEQ ID NO: 1488 - DNA, 21 bp, Artificial Sequence
  Description of Artificial Sequence: Synthetic oligonucleotide
ggcccagtgggagtgaactga

SEQ ID NO: 1489 - DNA, 21 bp, Artificial Sequence
  Description of Artificial Sequence: Synthetic oligonucleotide
ttgggcccagtgggagtgaac

SEQ ID NO: 1490 - DNA, 21 bp, Artificial Sequence
  Description of Artificial Sequence: Synthetic oligonucleotide
ggtccggacgaactgctgctg

SEQ ID NO: 1491 - DNA, 21 bp, Artificial Sequence
  Description of Artificial Sequence: Synthetic oligonucleotide
atgggctcaaaggaggtagaa

SEQ ID NO: 1492 - DNA, 21 bp, Artificial Sequence
  Description of Artificial Sequence: Synthetic oligonucleotide
tgacagctctttggggagttc

SEQ ID NO: 1493 - DNA, 21 bp, Artificial Sequence
  Description of Artificial Sequence: Synthetic oligonucleotide
ctgacagctctttggggagtt

SEQ ID NO: 1494 - DNA, 21 bp, Artificial Sequence
  Description of Artificial Sequence: Synthetic oligonucleotide
tgaggacatcaactcctccag

SEQ ID NO: 1495 - DNA, 21 bp, Artificial Sequence
  Description of Artificial Sequence: Synthetic oligonucleotide
cagggccacccaccttctgag

SEQ ID NO: 1496 - DNA, 21 bp, Artificial Sequence
  Description of Artificial Sequence: Synthetic oligonucleotide
tagatataatcgtggtctccc

SEQ ID NO: 1497 - DNA, 21 bp, Artificial Sequence
  Description of Artificial Sequence: Synthetic oligonucleotide
actctcgtccaggttgtagat

SEQ ID NO: 1498 - DNA, 21 bp, Artificial Sequence
  Description of Artificial Sequence: Synthetic oligonucleotide
tgggggttcacccacttgtag

SEQ ID NO: 1499 - DNA, 21 bp, Artificial Sequence
  Description of Artificial Sequence: Synthetic oligonucleotide
acccacttgtaggtgccctca

SEQ ID NO: 1500 - DNA, 21 bp, Artificial Sequence
  Description of Artificial Sequence: Synthetic oligonucleotide
taggtgccctcatactggaaa

SEQ ID NO: 1501 - DNA, 21 bp, Artificial Sequence
  Description of Artificial Sequence: Synthetic oligonucleotide
atcagctcgtctgcctccgtg

SEQ ID NO: 1502 - DNA, 21 bp, Artificial Sequence
  Description of Artificial Sequence: Synthetic oligonucleotide
cctcacctgccataaatatag

SEQ ID NO: 1503 - DNA, 21 bp, Artificial Sequence
  Description of Artificial Sequence: Synthetic oligonucleotide
ctcacctgccataaatatagg

SEQ ID NO: 1504 - DNA, 21 bp, Artificial Sequence
  Description of Artificial Sequence: Synthetic oligonucleotide
ggcttctccagctcaatctgg

SEQ ID NO: 1505 - DNA, 21 bp, Artificial Sequence
  Description of Artificial Sequence: Synthetic oligonucleotide
tccagctcaatctggtgcagc

SEQ ID NO: 1506 - DNA, 21 bp, Artificial Sequence
  Description of Artificial Sequence: Synthetic oligonucleotide
tctgtagggcaccttgtatct

SEQ ID NO: 1507 - DNA, 21 bp, Artificial Sequence
  Description of Artificial Sequence: Synthetic oligonucleotide
tatctgttgccgtaggtcagg

SEQ ID NO: 1508 - DNA, 21 bp, Artificial Sequence
  Description of Artificial Sequence: Synthetic oligonucleotide
ccgtaggtcaggtccagctcc

SEQ ID NO: 1509 - DNA, 21 bp, Artificial Sequence
  Description of Artificial Sequence: Synthetic oligonucleotide
aagaacatgcccggcttcttg

SEQ ID NO: 1510 - DNA, 21 bp, Artificial Sequence
  Description of Artificial Sequence: Synthetic oligonucleotide
ttggtcatcatcttggtgtac

SEQ ID NO: 1511 - DNA, 21 bp, Artificial Sequence
  Description of Artificial Sequence: Synthetic oligonucleotide
gtcatcatcttggtgtacacg

SEQ ID NO: 1512 - DNA, 21 bp, Artificial Sequence
  Description of Artificial Sequence: Synthetic oligonucleotide
gtgtacacggcctcgttgggc

SEQ ID NO: 1513 - DNA, 21 bp, Artificial Sequence
  Description of Artificial Sequence: Synthetic oligonucleotide
ggctgcacgcggatcaccagc

SEQ ID NO: 1514 - DNA, 21 bp, Artificial Sequence
  Description of Artificial Sequence: Synthetic oligonucleotide
cgcttgcactgctggtggaag

SEQ ID NO: 1515 - DNA, 21 bp, Artificial Sequence
  Description of Artificial Sequence: Synthetic oligonucleotide
cactgctggtggaagatgtcg

SEQ ID NO: 1516 - DNA, 21 bp, Artificial Sequence
  Description of Artificial Sequence: Synthetic oligonucleotide
cgctcgttcagggccttgccg

SEQ ID NO: 1517 - DNA, 21 bp, Artificial Sequence
  Description of Artificial Sequence: Synthetic oligonucleotide
agggccttgccgcagcgcagg

SEQ ID NO: 1518 - DNA, 21 bp, Artificial Sequence
  Description of Artificial Sequence: Synthetic oligonucleotide
ccgcagcgcaggatgaagggc

SEQ ID NO: 1519 - DNA, 21 bp, Artificial Sequence
  Description of Artificial Sequence: Synthetic oligonucleotide
cagtatgagggcacctacaag

SEQ ID NO: 1520 - DNA, 21 bp, Artificial Sequence
  Description of Artificial Sequence: Synthetic oligonucleotide
ccagtatgagggcacctacaa

SEQ ID NO: 1521 - DNA, 21 bp, Artificial Sequence
  Description of Artificial Sequence: Synthetic oligonucleotide
agctggagaagcccaagccca

SEQ ID NO: 1522 - DNA, 21 bp, Artificial Sequence
  Description of Artificial Sequence: Synthetic oligonucleotide
accccactgctgcaccagatt

SEQ ID NO: 1523 - DNA, 21 bp, Artificial Sequence
  Description of Artificial Sequence: Synthetic oligonucleotide
caccccactgctgcaccagat

SEQ ID NO: 1524 - DNA, 21 bp, Artificial Sequence
  Description of Artificial Sequence: Synthetic oligonucleotide
tcaccccactgctgcaccaga

SEQ ID NO: 1525 - DNA, 21 bp, Artificial Sequence
  Description of Artificial Sequence: Synthetic oligonucleotide
tgcgggagccagatgcacttc

SEQ ID NO: 1526 - DNA, 21 bp, Artificial Sequence
  Description of Artificial Sequence: Synthetic oligonucleotide
aaccccgaggagtcggagctg

SEQ ID NO: 1527 - DNA, 21 bp, Artificial Sequence
  Description of Artificial Sequence: Synthetic oligonucleotide
ttcaaccccgaggagtcggag

SEQ ID NO: 1528 - DNA, 21 bp, Artificial Sequence
  Description of Artificial Sequence: Synthetic oligonucleotide
caccagcagtgcaagcgcaac

SEQ ID NO: 1529 - DNA, 21 bp, Artificial Sequence
  Description of Artificial Sequence: Synthetic oligonucleotide
catgatgtggccggcgacatc

SEQ ID NO: 1530 - DNA, 21 bp, Artificial Sequence
  Description of Artificial Sequence: Synthetic oligonucleotide
atcctgcgctgcggcaaggcc

SEQ ID NO: 1531 - DNA, 21 bp, Artificial Sequence
  Description of Artificial Sequence: Synthetic oligonucleotide
cgccacgtaggggtgcccttc

SEQ ID NO: 1532 - DNA, 21 bp, Artificial Sequence
  Description of Artificial Sequence: Synthetic oligonucleotide
ccgccacgtaggggtgccctt

SEQ ID NO: 1533 - DNA, 21 bp, Artificial Sequence
  Description of Artificial Sequence: Synthetic oligonucleotide
atgaagataaattgatagcac

SEQ ID NO: 1534 - DNA, 21 bp, Artificial Sequence
  Description of Artificial Sequence: Synthetic oligonucleotide
atagcacaaaatctagaactt

SEQ ID NO: 1535 - DNA, 21 bp, Artificial Sequence
  Description of Artificial Sequence: Synthetic oligonucleotide
atgaaaccataaaaattggtt

SEQ ID NO: 1536 - DNA, 21 bp, Artificial Sequence
  Description of Artificial Sequence: Synthetic oligonucleotide
gtttgactaagcttaattgct

SEQ ID NO: 1537 - DNA, 21 bp, Artificial Sequence
  Description of Artificial Sequence: Synthetic oligonucleotide
gactaagcttaattgctttct

SEQ ID NO: 1538 - DNA, 21 bp, Artificial Sequence
  Description of Artificial Sequence: Synthetic oligonucleotide
actaagcttaattgctttctg

SEQ ID NO: 1539 - DNA, 21 bp, Artificial Sequence
  Description of Artificial Sequence: Synthetic oligonucleotide
attgctttctggaacaggatc

SEQ ID NO: 1540 - DNA, 21 bp, Artificial Sequence
  Description of Artificial Sequence: Synthetic oligonucleotide
ctttctggaacaggatctgaa

SEQ ID NO: 1541 - DNA, 21 bp, Artificial Sequence
  Description of Artificial Sequence: Synthetic oligonucleotide
ctggaacaggatctgaaactg

SEQ ID NO: 1542 - DNA, 21 bp, Artificial Sequence
  Description of Artificial Sequence: Synthetic oligonucleotide
tggaacaggatctgaaactgg

SEQ ID NO: 1543 - DNA, 21 bp, Artificial Sequence
  Description of Artificial Sequence: Synthetic oligonucleotide
tctaatgtccgttaaaggtac

SEQ ID NO: 1544 - DNA, 21 bp, Artificial Sequence
  Description of Artificial Sequence: Synthetic oligonucleotide
aaggtacgacaccacagagga

SEQ ID NO: 1545 - DNA, 21 bp, Artificial Sequence
  Description of Artificial Sequence: Synthetic oligonucleotide
tttatacccatcaacactggt

SEQ ID NO: 1546 - DNA, 21 bp, Artificial Sequence
  Description of Artificial Sequence: Synthetic oligonucleotide
atacccatcaacactggtaag

SEQ ID NO: 1547 - DNA, 21 bp, Artificial Sequence
  Description of Artificial Sequence: Synthetic oligonucleotide
tacccatcaacactggtaaga

SEQ ID NO: 1548 - DNA, 21 bp, Artificial Sequence
  Description of Artificial Sequence: Synthetic oligonucleotide
atcagctgaaaaggaaacagc

SEQ ID NO: 1549 - DNA, 21 bp, Artificial Sequence
  Description of Artificial Sequence: Synthetic oligonucleotide
atgatgctaaactgttcagaa

SEQ ID NO: 1550 - DNA, 21 bp, Artificial Sequence
  Description of Artificial Sequence: Synthetic oligonucleotide
agaaaacaacaaagaagagac

SEQ ID NO: 1551 - DNA, 21 bp, Artificial Sequence
  Description of Artificial Sequence: Synthetic oligonucleotide
cttcttttaggatgtggatgt

SEQ ID NO: 1552 - DNA, 21 bp, Artificial Sequence
  Description of Artificial Sequence: Synthetic oligonucleotide
ttcttttaggatgtggatgta

SEQ ID NO: 1553 - DNA, 21 bp, Artificial Sequence
  Description of Artificial Sequence: Synthetic oligonucleotide
ttttaggatgtggatgtagaa

SEQ ID NO: 1554 - DNA, 21 bp, Artificial Sequence
  Description of Artificial Sequence: Synthetic oligonucleotide
taggatgtggatgtagaagag

SEQ ID NO: 1555 - DNA, 21 bp, Artificial Sequence
  Description of Artificial Sequence: Synthetic oligonucleotide
aggatgtggatgtagaagagg

SEQ ID NO: 1556 - DNA, 21 bp, Artificial Sequence
  Description of Artificial Sequence: Synthetic oligonucleotide
ggatgtggatgtagaagaggc

SEQ ID NO: 1557 - DNA, 21 bp, Artificial Sequence
  Description of Artificial Sequence: Synthetic oligonucleotide
tggggcagtatactgaagaac

SEQ ID NO: 1558 - DNA, 21 bp, Artificial Sequence
  Description of Artificial Sequence: Synthetic oligonucleotide
ttcatcaattggcggggttcc

SEQ ID NO: 1559 - DNA, 21 bp, Artificial Sequence
  Description of Artificial Sequence: Synthetic oligonucleotide
atcaattggcggggttccatt

SEQ ID NO: 1560 - DNA, 21 bp, Artificial Sequence
  Description of Artificial Sequence: Synthetic oligonucleotide
gcggggttccatttttccagg

SEQ ID NO: 1561 - DNA, 21 bp, Artificial Sequence
  Description of Artificial Sequence: Synthetic oligonucleotide
tcccgccttaaatccacagca

SEQ ID NO: 1562 - DNA, 21 bp, Artificial Sequence
  Description of Artificial Sequence: Synthetic oligonucleotide
cccgccttaaatccacagcat

SEQ ID NO: 1563 - DNA, 21 bp, Artificial Sequence
  Description of Artificial Sequence: Synthetic oligonucleotide
ccgccttaaatccacagcata

SEQ ID NO: 1564 - DNA, 21 bp, Artificial Sequence
  Description of Artificial Sequence: Synthetic oligonucleotide
aatccacagcataaaaaatca

SEQ ID NO: 1565 - DNA, 21 bp, Artificial Sequence
  Description of Artificial Sequence: Synthetic oligonucleotide
acacactggagaggtctaaag

SEQ ID NO: 1566 - DNA, 21 bp, Artificial Sequence
  Description of Artificial Sequence: Synthetic oligonucleotide
gttacaaagagcagattacct

SEQ ID NO: 1567 - DNA, 21 bp, Artificial Sequence
  Description of Artificial Sequence: Synthetic oligonucleotide
caaagagcagattacctctgc

SEQ ID NO: 1568 - DNA, 21 bp, Artificial Sequence
  Description of Artificial Sequence: Synthetic oligonucleotide
cctctgcgagcccagatcaac

SEQ ID NO: 1569 - DNA, 21 bp, Artificial Sequence
  Description of Artificial Sequence: Synthetic oligonucleotide
tagattttgtgctatcaattt

SEQ ID NO: 1570 - DNA, 21 bp, Artificial Sequence
  Description of Artificial Sequence: Synthetic oligonucleotide
agttctagattttgtgctatc

SEQ ID NO: 1571 - DNA, 21 bp, Artificial Sequence
  Description of Artificial Sequence: Synthetic oligonucleotide
attaagttctagattttgtgc

SEQ ID NO: 1572 - DNA, 21 bp, Artificial Sequence
  Description of Artificial Sequence: Synthetic oligonucleotide
cattaagttctagattttgtg

SEQ ID NO: 1573 - DNA, 21 bp, Artificial Sequence
  Description of Artificial Sequence: Synthetic oligonucleotide
tggtttcattaagttctagat

SEQ ID NO: 1574 - DNA, 21 bp, Artificial Sequence
  Description of Artificial Sequence: Synthetic oligonucleotide
atggtttcattaagttctaga

SEQ ID NO: 1575 - DNA, 21 bp, Artificial Sequence
  Description of Artificial Sequence: Synthetic oligonucleotide
tatggtttcattaagttctag

SEQ ID NO: 1576 - DNA, 21 bp, Artificial Sequence
  Description of Artificial Sequence: Synthetic oligonucleotide
ttatggtttcattaagttcta

SEQ ID NO: 1577 - DNA, 21 bp, Artificial Sequence
  Description of Artificial Sequence: Synthetic oligonucleotide
gtcaaaccaatttttatggtt

SEQ ID NO: 1578 - DNA, 21 bp, Artificial Sequence
  Description of Artificial Sequence: Synthetic oligonucleotide
agcttagtcaaaccaattttt

SEQ ID NO: 1579 - DNA, 21 bp, Artificial Sequence
  Description of Artificial Sequence: Synthetic oligonucleotide
cagaaagcaattaagcttagt

SEQ ID NO: 1580 - DNA, 21 bp, Artificial Sequence
  Description of Artificial Sequence: Synthetic oligonucleotide
agatcctgttccagaaagcaa

SEQ ID NO: 1581 - DNA, 21 bp, Artificial Sequence
  Description of Artificial Sequence: Synthetic oligonucleotide
cagatcctgttccagaaagca

SEQ ID NO: 1582 - DNA, 21 bp, Artificial Sequence
  Description of Artificial Sequence: Synthetic oligonucleotide
ggatatccagtttcagatcct

SEQ ID NO: 1583 - DNA, 21 bp, Artificial Sequence
  Description of Artificial Sequence: Synthetic oligonucleotide
aagtacctgttgggatatcca

SEQ ID NO: 1584 - DNA, 21 bp, Artificial Sequence
  Description of Artificial Sequence: Synthetic oligonucleotide
aaagtacctgttgggatatcc

SEQ ID NO: 1585 - DNA, 21 bp, Artificial Sequence
  Description of Artificial Sequence: Synthetic oligonucleotide
taaagtacctgttgggatatc

SEQ ID NO: 1586 - DNA, 21 bp, Artificial Sequence
  Description of Artificial Sequence: Synthetic oligonucleotide
tcttttaaagtacctgttggg

SEQ ID NO: 1587 - DNA, 21 bp, Artificial Sequence
  Description of Artificial Sequence: Synthetic oligonucleotide
ctcttttaaagtacctgttgg

SEQ ID NO: 1588 - DNA, 21 bp, Artificial Sequence
  Description of Artificial Sequence: Synthetic oligonucleotide
tatttctcttttaaagtacct

SEQ ID NO: 1589 - DNA, 21 bp, Artificial Sequence
  Description of Artificial Sequence: Synthetic oligonucleotide
atgggtataaataacttttcc

SEQ ID NO: 1590 - DNA, 21 bp, Artificial Sequence
  Description of Artificial Sequence: Synthetic oligonucleotide
ccagtgttgatgggtataaat

SEQ ID NO: 1591 - DNA, 21 bp, Artificial Sequence
  Description of Artificial Sequence: Synthetic oligonucleotide
ttaccagtgttgatgggtata

SEQ ID NO: 1592 - DNA, 21 bp, Artificial Sequence
  Description of Artificial Sequence: Synthetic oligonucleotide
agttcttaccagtgttgatgg

SEQ ID NO: 1593 - DNA, 21 bp, Artificial Sequence
  Description of Artificial Sequence: Synthetic oligonucleotide
acgtggttcagttcttaccag

SEQ ID NO: 1594 - DNA, 21 bp, Artificial Sequence
  Description of Artificial Sequence: Synthetic oligonucleotide
agctgatcaaggagatgttca

SEQ ID NO: 1595 - DNA, 21 bp, Artificial Sequence
  Description of Artificial Sequence: Synthetic oligonucleotide
cagctgatcaaggagatgttc

SEQ ID NO: 1596 - DNA, 21 bp, Artificial Sequence
  Description of Artificial Sequence: Synthetic oligonucleotide
tcagctgatcaaggagatgtt

SEQ ID NO: 1597 - DNA, 21 bp, Artificial Sequence
  Description of Artificial Sequence: Synthetic oligonucleotide
cttttcagctgatcaaggaga

SEQ ID NO: 1598 - DNA, 21 bp, Artificial Sequence
  Description of Artificial Sequence: Synthetic oligonucleotide
ccttttcagctgatcaaggag

SEQ ID NO: 1599 - DNA, 21 bp, Artificial Sequence
  Description of Artificial Sequence: Synthetic oligonucleotide
acagctcaggctgtttccttt

SEQ ID NO: 1600 - DNA, 21 bp, Artificial Sequence
  Description of Artificial Sequence: Synthetic oligonucleotide
gcatcattaacagctcaggct

SEQ ID NO: 1601 - DNA, 21 bp, Artificial Sequence
  Description of Artificial Sequence: Synthetic oligonucleotide
agcatcattaacagctcaggc

SEQ ID NO: 1602 - DNA, 21 bp, Artificial Sequence
  Description of Artificial Sequence: Synthetic oligonucleotide
tgaacagtttagcatcattaa

SEQ ID NO: 1603 - DNA, 21 bp, Artificial Sequence
  Description of Artificial Sequence: Synthetic oligonucleotide
ctgaacagtttagcatcatta

SEQ ID NO: 1604 - DNA, 21 bp, Artificial Sequence
  Description of Artificial Sequence: Synthetic oligonucleotide
tctgaacagtttagcatcatt

SEQ ID NO: 1605 - DNA, 21 bp, Artificial Sequence
  Description of Artificial Sequence: Synthetic oligonucleotide
ttttctgaacagtttagcatc

SEQ ID NO: 1606 - DNA, 21 bp, Artificial Sequence
  Description of Artificial Sequence: Synthetic oligonucleotide
ttgttttctgaacagtttagc

SEQ ID NO: 1607 - DNA, 21 bp, Artificial Sequence
  Description of Artificial Sequence: Synthetic oligonucleotide
tttgttgttttctgaacagtt

SEQ ID NO: 1608 - DNA, 21 bp, Artificial Sequence
  Description of Artificial Sequence: Synthetic oligonucleotide
tctcttctttgttgttttctg

SEQ ID NO: 1609 - DNA, 21 bp, Artificial Sequence
  Description of Artificial Sequence: Synthetic oligonucleotide
ccggaattgtctcttctttgt

SEQ ID NO: 1610 - DNA, 21 bp, Artificial Sequence
  Description of Artificial Sequence: Synthetic oligonucleotide
accggaattgtctcttctttg

SEQ ID NO: 1611 - DNA, 21 bp, Artificial Sequence
  Description of Artificial Sequence: Synthetic oligonucleotide
aatttaccggaattgtctctt

SEQ ID NO: 1612 - DNA, 21 bp, Artificial Sequence
  Description of Artificial Sequence: Synthetic oligonucleotide
aaatttaccggaattgtctct

SEQ ID NO: 1613 - DNA, 21 bp, Artificial Sequence
  Description of Artificial Sequence: Synthetic oligonucleotide
agtatactgccccagaactgc

SEQ ID NO: 1614 - DNA, 21 bp, Artificial Sequence
  Description of Artificial Sequence: Synthetic oligonucleotide
ttcagtatactgccccagaac

SEQ ID NO: 1615 - DNA, 21 bp, Artificial Sequence
  Description of Artificial Sequence: Synthetic oligonucleotide
gaggttcttcagtatactgcc

SEQ ID NO: 1616 - DNA, 21 bp, Artificial Sequence
  Description of Artificial Sequence: Synthetic oligonucleotide
acttagaggttcttcagtata

SEQ ID NO: 1617 - DNA, 21 bp, Artificial Sequence
  Description of Artificial Sequence: Synthetic oligonucleotide
atgaacaatccacaccagcat

SEQ ID NO: 1618 - DNA, 21 bp, Artificial Sequence
  Description of Artificial Sequence: Synthetic oligonucleotide
tctgatatgacatacctggaa

SEQ ID NO: 1619 - DNA, 21 bp, Artificial Sequence
  Description of Artificial Sequence: Synthetic oligonucleotide
tcttttccatgtgatttttta

SEQ ID NO: 1620 - DNA, 21 bp, Artificial Sequence
  Description of Artificial Sequence: Synthetic oligonucleotide
gtcttttccatgtgatttttt

SEQ ID NO: 1621 - DNA, 21 bp, Artificial Sequence
  Description of Artificial Sequence: Synthetic oligonucleotide
tttgtcttttccatgtgattt

SEQ ID NO: 1622 - DNA, 21 bp, Artificial Sequence
  Description of Artificial Sequence: Synthetic oligonucleotide
ctttgtcttttccatgtgatt

SEQ ID NO: 1623 - DNA, 21 bp, Artificial Sequence
  Description of Artificial Sequence: Synthetic oligonucleotide
tctttgtcttttccatgtgat

SEQ ID NO: 1624 - DNA, 21 bp, Artificial Sequence
  Description of Artificial Sequence: Synthetic oligonucleotide
atgcctctgttttctttgtct

SEQ ID NO: 1625 - DNA, 21 bp, Artificial Sequence
  Description of Artificial Sequence: Synthetic oligonucleotide
gacctctccagtgtgttaatg

SEQ ID NO: 1626 - DNA, 21 bp, Artificial Sequence
  Description of Artificial Sequence: Synthetic oligonucleotide
agacctctccagtgtgttaat

SEQ ID NO: 1627 - DNA, 21 bp, Artificial Sequence
  Description of Artificial Sequence: Synthetic oligonucleotide
cactttagacctctccagtgt

SEQ ID NO: 1628 - DNA, 21 bp, Artificial Sequence
  Description of Artificial Sequence: Synthetic oligonucleotide
ttccactttagacctctccag

SEQ ID NO: 1629 - DNA, 21 bp, Artificial Sequence
  Description of Artificial Sequence: Synthetic oligonucleotide
cttccactttagacctctcca

SEQ ID NO: 1630 - DNA, 21 bp, Artificial Sequence
  Description of Artificial Sequence: Synthetic oligonucleotide
taaccaagtgctctgtagttt

SEQ ID NO: 1631 - DNA, 21 bp, Artificial Sequence
  Description of Artificial Sequence: Synthetic oligonucleotide
gtaaccaagtgctctgtagtt

SEQ ID NO: 1632 - DNA, 21 bp, Artificial Sequence
  Description of Artificial Sequence: Synthetic oligonucleotide
atctgggctcgcagaggtaat

SEQ ID NO: 1633 - DNA, 21 bp, Artificial Sequence
  Description of Artificial Sequence: Synthetic oligonucleotide
aaggttgatctgggctcgcag

SEQ ID NO: 1634 - DNA, 21 bp, Artificial Sequence
  Description of Artificial Sequence: Synthetic oligonucleotide
ccaacccccaagtgaattaaa

SEQ ID NO: 1635 - DNA, 20 bp, Artificial Sequence
  Description of Artificial Sequence: Synthetic oligonucleotide
tctaggtatgacaacgaatt

SEQ ID NO: 1636 - DNA, 20 bp, Artificial Sequence
  Description of Artificial Sequence: Synthetic oligonucleotide
agccccagcgtcaaaggtgg

SEQ ID NO: 1637 - DNA, 20 bp, Artificial Sequence
  Description of Artificial Sequence: Synthetic oligonucleotide
attgtatccacagtgaatct

SEQ ID NO: 1638 - DNA, 20 bp, Artificial Sequence
  Description of Artificial Sequence: Synthetic oligonucleotide
aaacgccgaatataatccca

SEQ ID NO: 1639 - DNA, 20 bp, Artificial Sequence
  Description of Artificial Sequence: Synthetic oligonucleotide
accattgtagcggtttgctg

SEQ ID NO: 1640 - DNA, 20 bp, Artificial Sequence
  Description of Artificial Sequence: Synthetic oligonucleotide
ggtttgctgcggtaatcatg

SEQ ID NO: 1641 - DNA, 20 bp, Artificial Sequence
  Description of Artificial Sequence: Synthetic oligonucleotide
gataagagagccacgaacca

SEQ ID NO: 1642 - DNA, 20 bp, Artificial Sequence
  Description of Artificial Sequence: Synthetic oligonucleotide
acggcactgattttcagttc

SEQ ID NO: 1643 - DNA, 20 bp, Artificial Sequence
  Description of Artificial Sequence: Synthetic oligonucleotide
cggcactgattttcagttct

SEQ ID NO: 1644 - DNA, 20 bp, Artificial Sequence
  Description of Artificial Sequence: Synthetic oligonucleotide
gattttcagttctgggaaaa

SEQ ID NO: 1645 - DNA, 20 bp, Artificial Sequence
  Description of Artificial Sequence: Synthetic oligonucleotide
tctgggaaaatggtgtgcac

SEQ ID NO: 1646 - DNA, 20 bp, Artificial Sequence
  Description of Artificial Sequence: Synthetic oligonucleotide
tggtgtgcacaggagccaag

SEQ ID NO: 1647 - DNA, 20 bp, Artificial Sequence
  Description of Artificial Sequence: Synthetic oligonucleotide
tagtgaagaacagtccagac

SEQ ID NO: 1648 - DNA, 20 bp, Artificial Sequence
  Description of Artificial Sequence: Synthetic oligonucleotide
tgctagagttgtacagaagt

SEQ ID NO: 1649 - DNA, 20 bp, Artificial Sequence
  Description of Artificial Sequence: Synthetic oligonucleotide
gctagagttgtacagaagtt

SEQ ID NO: 1650 - DNA, 20 bp, Artificial Sequence
  Description of Artificial Sequence: Synthetic oligonucleotide
gggttttccagctaagttct

SEQ ID NO: 1651 - DNA, 20 bp, Artificial Sequence
  Description of Artificial Sequence: Synthetic oligonucleotide
ggacttcaagattcagaata

SEQ ID NO: 1652 - DNA, 20 bp, Artificial Sequence
  Description of Artificial Sequence: Synthetic oligonucleotide
cttcaagattcagaatatgg

SEQ ID NO: 1653 - DNA, 20 bp, Artificial Sequence
  Description of Artificial Sequence: Synthetic oligonucleotide
ttcaagattcagaatatggt

SEQ ID NO: 1654 - DNA, 20 bp, Artificial Sequence
  Description of Artificial Sequence: Synthetic oligonucleotide
tcaagattcagaatatggtg

SEQ ID NO: 1655 - DNA, 20 bp, Artificial Sequence
  Description of Artificial Sequence: Synthetic oligonucleotide
gtgatgtgaagtttcctata

SEQ ID NO: 1656 - DNA, 20 bp, Artificial Sequence
  Description of Artificial Sequence: Synthetic oligonucleotide
aagtttcctataaggttaga

SEQ ID NO: 1657 - DNA, 20 bp, Artificial Sequence
  Description of Artificial Sequence: Synthetic oligonucleotide
tcacccaccaacaatttagt

SEQ ID NO: 1658 - DNA, 20 bp, Artificial Sequence
  Description of Artificial Sequence: Synthetic oligonucleotide
tatgagccagagttatttcc

SEQ ID NO: 1659 - DNA, 20 bp, Artificial Sequence
  Description of Artificial Sequence: Synthetic oligonucleotide
gttctccttatttttgtttc

SEQ ID NO: 1660 - DNA, 20 bp, Artificial Sequence
  Description of Artificial Sequence: Synthetic oligonucleotide
tctggaaaagttgtattaac

SEQ ID NO: 1661 - DNA, 20 bp, Artificial Sequence
  Description of Artificial Sequence: Synthetic oligonucleotide
aaacatctaccctattctaa

SEQ ID NO: 1662 - DNA, 20 bp, Artificial Sequence
  Description of Artificial Sequence: Synthetic oligonucleotide
accctattctaaagggattc

SEQ ID NO: 1663 - DNA, 20 bp, Artificial Sequence
  Description of Artificial Sequence: Synthetic oligonucleotide
gattcaggaagacgacgtaa

SEQ ID NO: 1664 - DNA, 20 bp, Artificial Sequence
  Description of Artificial Sequence: Synthetic oligonucleotide
cacgaagtgcaatggtcttt

SEQ ID NO: 1665 - DNA, 20 bp, Artificial Sequence
  Description of Artificial Sequence: Synthetic oligonucleotide
gtttcgggcacgaagtgcaa

SEQ ID NO: 1666 - DNA, 20 bp, Artificial Sequence
  Description of Artificial Sequence: Synthetic oligonucleotide
gggattatattcggcgtttc

SEQ ID NO: 1667 - DNA, 20 bp, Artificial Sequence
  Description of Artificial Sequence: Synthetic oligonucleotide
tgggattatattcggcgttt

SEQ ID NO: 1668 - DNA, 20 bp, Artificial Sequence
  Description of Artificial Sequence: Synthetic oligonucleotide
tctaaccttgggattatatt

SEQ ID NO: 1669 - DNA, 20 bp, Artificial Sequence
  Description of Artificial Sequence: Synthetic oligonucleotide
attaaaatagatctaacctt

SEQ ID NO: 1670 - DNA, 20 bp, Artificial Sequence
  Description of Artificial Sequence: Synthetic oligonucleotide
aaaatcagtgccgtggttcg

SEQ ID NO: 1671 - DNA, 20 bp, Artificial Sequence
  Description of Artificial Sequence: Synthetic oligonucleotide
agaactgaaaatcagtgccg

SEQ ID NO: 1672 - DNA, 20 bp, Artificial Sequence
  Description of Artificial Sequence: Synthetic oligonucleotide
aatttcttacggctacctct

SEQ ID NO: 1673 - DNA, 20 bp, Artificial Sequence
  Description of Artificial Sequence: Synthetic oligonucleotide
agtctggactgttcttcact

SEQ ID NO: 1674 - DNA, 20 bp, Artificial Sequence
  Description of Artificial Sequence: Synthetic oligonucleotide
atattttcttgctgccagtc

SEQ ID NO: 1675 - DNA, 20 bp, Artificial Sequence
  Description of Artificial Sequence: Synthetic oligonucleotide
ttgaagtccaagaacttagc

SEQ ID NO: 1676 - DNA, 20 bp, Artificial Sequence
  Description of Artificial Sequence: Synthetic oligonucleotide
acaaggccttctaaccttat

SEQ ID NO: 1677 - DNA, 20 bp, Artificial Sequence
  Description of Artificial Sequence: Synthetic oligonucleotide
attgttggtgggtgagcaca

SEQ ID NO: 1678 - DNA, 20 bp, Artificial Sequence
  Description of Artificial Sequence: Synthetic oligonucleotide
ttacctactaaattgttggt

SEQ ID NO: 1679 - DNA, 20 bp, Artificial Sequence
  Description of Artificial Sequence: Synthetic oligonucleotide
cttacctactaaattgttgg

SEQ ID NO: 1680 - DNA, 20 bp, Artificial Sequence
  Description of Artificial Sequence: Synthetic oligonucleotide
agacttacctactaaattgt

SEQ ID NO: 1681 - DNA, 20 bp, Artificial Sequence
  Description of Artificial Sequence: Synthetic oligonucleotide
attaaaccaggaaataactc

SEQ ID NO: 1682 - DNA, 20 bp, Artificial Sequence
  Description of Artificial Sequence: Synthetic oligonucleotide
atcattctgtagattaaacc

SEQ ID NO: 1683 - DNA, 20 bp, Artificial Sequence
  Description of Artificial Sequence: Synthetic oligonucleotide
aaaataaggagaacaattct

SEQ ID NO: 1684 - DNA, 20 bp, Artificial Sequence
  Description of Artificial Sequence: Synthetic oligonucleotide
cttttccagaaacaaaaata

SEQ ID NO: 1685 - DNA, 20 bp, Artificial Sequence
  Description of Artificial Sequence: Synthetic oligonucleotide
tcctgaatccctttagaata

SEQ ID NO: 1686 - DNA, 20 bp, Artificial Sequence
  Description of Artificial Sequence: Synthetic oligonucleotide
ttcctgaatccctttagaat

SEQ ID NO: 1687 - DNA, 20 bp, Artificial Sequence
  Description of Artificial Sequence: Synthetic oligonucleotide
ctcactcccactgctgtccc

SEQ ID NO: 1688 - DNA, 20 bp, Artificial Sequence
  Description of Artificial Sequence: Synthetic oligonucleotide
ccctggcagtgcagaagtcc

SEQ ID NO: 1689 - DNA, 20 bp, Artificial Sequence
  Description of Artificial Sequence: Synthetic oligonucleotide
cctggcagtgcagaagtcca

SEQ ID NO: 1690 - DNA, 20 bp, Artificial Sequence
  Description of Artificial Sequence: Synthetic oligonucleotide
cagtgcagaagtccagggaa

SEQ ID NO: 1691 - DNA, 20 bp, Artificial Sequence
  Description of Artificial Sequence: Synthetic oligonucleotide
gcagaagtccagggaatggc

SEQ ID NO: 1692 - DNA, 20 bp, Artificial Sequence
  Description of Artificial Sequence: Synthetic oligonucleotide
ggcccagcagctgagatcac

SEQ ID NO: 1693 - DNA, 20 bp, Artificial Sequence
  Description of Artificial Sequence: Synthetic oligonucleotide
ggggctatcattgtagtgag

SEQ ID NO: 1694 - DNA, 20 bp, Artificial Sequence
  Description of Artificial Sequence: Synthetic oligonucleotide
gctatcattgtagtgagtgg

SEQ ID NO: 1695 - DNA, 20 bp, Artificial Sequence
  Description of Artificial Sequence: Synthetic oligonucleotide
attgtagtgagtggcggccc

SEQ ID NO: 1696 - DNA, 20 bp, Artificial Sequence
  Description of Artificial Sequence: Synthetic oligonucleotide
ttgtagtgagtggcggccct

SEQ ID NO: 1697 - DNA, 20 bp, Artificial Sequence
  Description of Artificial Sequence: Synthetic oligonucleotide
cggccctgggactgatagca

SEQ ID NO: 1698 - DNA, 20 bp, Artificial Sequence
  Description of Artificial Sequence: Synthetic oligonucleotide
gggactgatagcaaggacag

SEQ ID NO: 1699 - DNA, 20 bp, Artificial Sequence
  Description of Artificial Sequence: Synthetic oligonucleotide
tgagctcagttcactcccac

SEQ ID NO: 1700 - DNA, 20 bp, Artificial Sequence
  Description of Artificial Sequence: Synthetic oligonucleotide
gagctcagttcactcccact

SEQ ID NO: 1701 - DNA, 20 bp, Artificial Sequence
  Description of Artificial Sequence: Synthetic oligonucleotide
cccactgggcccaacaacac

SEQ ID NO: 1702 - DNA, 20 bp, Artificial Sequence
  Description of Artificial Sequence: Synthetic oligonucleotide
gcccaacaacactggacacc

SEQ ID NO: 1703 - DNA, 20 bp, Artificial Sequence
  Description of Artificial Sequence: Synthetic oligonucleotide
actgcagtcttctgccctgc

SEQ ID NO: 1704 - DNA, 20 bp, Artificial Sequence
  Description of Artificial Sequence: Synthetic oligonucleotide
agtaacagcagcagttcgtc

SEQ ID NO: 1705 - DNA, 20 bp, Artificial Sequence
  Description of Artificial Sequence: Synthetic oligonucleotide
tacctcctttgagcccatca

SEQ ID NO: 1706 - DNA, 20 bp, Artificial Sequence
  Description of Artificial Sequence: Synthetic oligonucleotide
cccatcaaggcagaccccac

SEQ ID NO: 1707 - DNA, 20 bp, Artificial Sequence
  Description of Artificial Sequence: Synthetic oligonucleotide
atcaaggcagaccccacagg

SEQ ID NO: 1708 - DNA, 20 bp, Artificial Sequence
  Description of Artificial Sequence: Synthetic oligonucleotide
gaaatctttgatcccacacg

SEQ ID NO: 1709 - DNA, 20 bp, Artificial Sequence
  Description of Artificial Sequence: Synthetic oligonucleotide
tctttgatcccacacgaggt

SEQ ID NO: 1710 - DNA, 20 bp, Artificial Sequence
  Description of Artificial Sequence: Synthetic oligonucleotide
attcccagagtgcatgagct

SEQ ID NO: 1711 - DNA, 20 bp, Artificial Sequence
  Description of Artificial Sequence: Synthetic oligonucleotide
gtgcatgagctcggagctgc

SEQ ID NO: 1712 - DNA, 20 bp, Artificial Sequence
  Description of Artificial Sequence: Synthetic oligonucleotide
gaggagttgatgtcctcaga

SEQ ID NO: 1713 - DNA, 20 bp, Artificial Sequence
  Description of Artificial Sequence: Synthetic oligonucleotide
gagttgatgtcctcagaagg

SEQ ID NO: 1714 - DNA, 20 bp, Artificial Sequence
  Description of Artificial Sequence: Synthetic oligonucleotide
agttgatgtcctcagaaggt

SEQ ID NO: 1715 - DNA, 20 bp, Artificial Sequence
  Description of Artificial Sequence: Synthetic oligonucleotide
gcttcgtctttctccacccc

SEQ ID NO: 1716 - DNA, 20 bp, Artificial Sequence
  Description of Artificial Sequence: Synthetic oligonucleotide
cttcgtctttctccaccccc

SEQ ID NO: 1717 - DNA, 20 bp, Artificial Sequence
  Description of Artificial Sequence: Synthetic oligonucleotide
ccacgattatatctacaacc

SEQ ID NO: 1718 - DNA, 20 bp, Artificial Sequence
  Description of Artificial Sequence: Synthetic oligonucleotide
tacaacctggacgagagtga

SEQ ID NO: 1719 - DNA, 20 bp, Artificial Sequence
  Description of Artificial Sequence: Synthetic oligonucleotide
gcactgccagggacagcagt

SEQ ID NO: 1720 - DNA, 20 bp, Artificial Sequence
  Description of Artificial Sequence: Synthetic oligonucleotide
tgcactgccagggacagcag

SEQ ID NO: 1721 - DNA, 20 bp, Artificial Sequence
  Description of Artificial Sequence: Synthetic oligonucleotide
cctggacttctgcactgcca

SEQ ID NO: 1722 - DNA, 20 bp, Artificial Sequence
  Description of Artificial Sequence: Synthetic oligonucleotide
ccctggacttctgcactgcc

SEQ ID NO: 1723 - DNA, 20 bp, Artificial Sequence
  Description of Artificial Sequence: Synthetic oligonucleotide
ctgctgggccagccattccc

SEQ ID NO: 1724 - DNA, 20 bp, Artificial Sequence
  Description of Artificial Sequence: Synthetic oligonucleotide
tgtccttgctatcagtccca

SEQ ID NO: 1725 - DNA, 20 bp, Artificial Sequence
  Description of Artificial Sequence: Synthetic oligonucleotide
ctgtccttgctatcagtccc

SEQ ID NO: 1726 - DNA, 20 bp, Artificial Sequence
  Description of Artificial Sequence: Synthetic oligonucleotide
ccagtgttgttgggcccagt

SEQ ID NO: 1727 - DNA, 20 bp, Artificial Sequence
  Description of Artificial Sequence: Synthetic oligonucleotide
tccagtgttgttgggcccag

SEQ ID NO: 1728 - DNA, 20 bp, Artificial Sequence
  Description of Artificial Sequence: Synthetic oligonucleotide
gccgggtgtccagtgttgtt

SEQ ID NO: 1729 - DNA, 20 bp, Artificial Sequence
  Description of Artificial Sequence: Synthetic oligonucleotide
ggccgggtgtccagtgttgt

SEQ ID NO: 1730 - DNA, 20 bp, Artificial Sequence
  Description of Artificial Sequence: Synthetic oligonucleotide
agcagggcagaagactgcag

SEQ ID NO: 1731 - DNA, 20 bp, Artificial Sequence
  Description of Artificial Sequence: Synthetic oligonucleotide
gctgctgctgctgtccagca

SEQ ID NO: 1732 - DNA, 20 bp, Artificial Sequence
  Description of Artificial Sequence: Synthetic oligonucleotide
ggaggtagaagggttgggtc

SEQ ID NO: 1733 - DNA, 20 bp, Artificial Sequence
  Description of Artificial Sequence: Synthetic oligonucleotide
tgggctcaaaggaggtagaa

SEQ ID NO: 1734 - DNA, 20 bp, Artificial Sequence
  Description of Artificial Sequence: Synthetic oligonucleotide
atgggctcaaaggaggtaga

SEQ ID NO: 1735 - DNA, 20 bp, Artificial Sequence
  Description of Artificial Sequence: Synthetic oligonucleotide
tgccttgatgggctcaaagg

SEQ ID NO: 1736 - DNA, 20 bp, Artificial Sequence
  Description of Artificial Sequence: Synthetic oligonucleotide
gtctgccttgatgggctcaa

SEQ ID NO: 1737 - DNA, 20 bp, Artificial Sequence
  Description of Artificial Sequence: Synthetic oligonucleotide
cctgtggggtctgccttgat

SEQ ID NO: 1738 - DNA, 20 bp, Artificial Sequence
  Description of Artificial Sequence: Synthetic oligonucleotide
acctgtggggtctgccttga

SEQ ID NO: 1739 - DNA, 20 bp, Artificial Sequence
  Description of Artificial Sequence: Synthetic oligonucleotide
gcaggtactcaccacctgtg

SEQ ID NO: 1740 - DNA, 20 bp, Artificial Sequence
  Description of Artificial Sequence: Synthetic oligonucleotide
ggcaggtactcaccacctgt

SEQ ID NO: 1741 - DNA, 20 bp, Artificial Sequence
  Description of Artificial Sequence: Synthetic oligonucleotide
gggcaggtactcaccacctg

SEQ ID NO: 1742 - DNA, 20 bp, Artificial Sequence
  Description of Artificial Sequence: Synthetic oligonucleotide
agatttctgacagctctttg

SEQ ID NO: 1743 - DNA, 20 bp, Artificial Sequence
  Description of Artificial Sequence: Synthetic oligonucleotide
aagatttctgacagctcttt

SEQ ID NO: 1744 - DNA, 20 bp, Artificial Sequence
  Description of Artificial Sequence: Synthetic oligonucleotide
aaagatttctgacagctctt

SEQ ID NO: 1745 - DNA, 20 bp, Artificial Sequence
  Description of Artificial Sequence: Synthetic oligonucleotide
tgcagcagcctacctcgtgt

SEQ ID NO: 1746 - DNA, 20 bp, Artificial Sequence
  Description of Artificial Sequence: Synthetic oligonucleotide
atgcagcagcctacctcgtg

SEQ ID NO: 1747 - DNA, 20 bp, Artificial Sequence
  Description of Artificial Sequence: Synthetic oligonucleotide
gctccgagctcatgcactct

SEQ ID NO: 1748 - DNA, 20 bp, Artificial Sequence
  Description of Artificial Sequence: Synthetic oligonucleotide
agctccgagctcatgcactc

SEQ ID NO: 1749 - DNA, 20 bp, Artificial Sequence
  Description of Artificial Sequence: Synthetic oligonucleotide
ccagggccacccaccttctg

SEQ ID NO: 1750 - DNA, 20 bp, Artificial Sequence
  Description of Artificial Sequence: Synthetic oligonucleotide
tggagaaagacgaagcagag

SEQ ID NO: 1751 - DNA, 20 bp, Artificial Sequence
  Description of Artificial Sequence: Synthetic oligonucleotide
gtggagaaagacgaagcaga

SEQ ID NO: 1752 - DNA, 20 bp, Artificial Sequence
  Description of Artificial Sequence: Synthetic oligonucleotide
ggtggagaaagacgaagcag

SEQ ID NO: 1753 - DNA, 20 bp, Artificial Sequence
  Description of Artificial Sequence: Synthetic oligonucleotide
taatcgtggtctcccggggg

SEQ ID NO: 1754 - DNA, 20 bp, Artificial Sequence
  Description of Artificial Sequence: Synthetic oligonucleotide
atataatcgtggtctcccgg

SEQ ID NO: 1755 - DNA, 20 bp, Artificial Sequence
  Description of Artificial Sequence: Synthetic oligonucleotide
gatataatcgtggtctcccg

SEQ ID NO: 1756 - DNA, 20 bp, Artificial Sequence
  Description of Artificial Sequence: Synthetic oligonucleotide
agatataatcgtggtctccc

SEQ ID NO: 1757 - DNA, 20 bp, Artificial Sequence
  Description of Artificial Sequence: Synthetic oligonucleotide
tagatataatcgtggtctcc

SEQ ID NO: 1758 - DNA, 20 bp, Artificial Sequence
  Description of Artificial Sequence: Synthetic oligonucleotide
ccaggttgtagatataatcg

SEQ ID NO: 1759 - DNA, 20 bp, Artificial Sequence
  Description of Artificial Sequence: Synthetic oligonucleotide
agacaccttcactctcgtcc

SEQ ID NO: 1760 - DNA, 20 bp, Artificial Sequence
  Description of Artificial Sequence: Synthetic oligonucleotide
tgagaacaggcacatcaaag

SEQ ID NO: 1761 - DNA, 20 bp, Artificial Sequence
  Description of Artificial Sequence: Synthetic oligonucleotide
gtgggggttcacccacttgt

SEQ ID NO: 1762 - DNA, 20 bp, Artificial Sequence
  Description of Artificial Sequence: Synthetic oligonucleotide
acttgtaggtgccctcatac

SEQ ID NO: 1763 - DNA, 20 bp, Artificial Sequence
  Description of Artificial Sequence: Synthetic oligonucleotide
catcagctcgtctgcctccg

SEQ ID NO: 1764 - DNA, 20 bp, Artificial Sequence
  Description of Artificial Sequence: Synthetic oligonucleotide
atcagctcgtctgcctccgt

SEQ ID NO: 1765 - DNA, 20 bp, Artificial Sequence
  Description of Artificial Sequence: Synthetic oligonucleotide
tcagctcgtctgcctccgtg

SEQ ID NO: 1766 - DNA, 20 bp, Artificial Sequence
  Description of Artificial Sequence: Synthetic oligonucleotide
cgtctgcctccgtggggcct

SEQ ID NO: 1767 - DNA, 20 bp, Artificial Sequence
  Description of Artificial Sequence: Synthetic oligonucleotide
tgcctccgtggggcctcggc

SEQ ID NO: 1768 - DNA, 20 bp, Artificial Sequence
  Description of Artificial Sequence: Synthetic oligonucleotide
tcctcacctgccataaatat

SEQ ID NO: 1769 - DNA, 20 bp, Artificial Sequence
  Description of Artificial Sequence: Synthetic oligonucleotide
cctcacctgccataaatata

SEQ ID NO: 1770 - DNA, 20 bp, Artificial Sequence
  Description of Artificial Sequence: Synthetic oligonucleotide
ctcacctgccataaatatag

SEQ ID NO: 1771 - DNA, 20 bp, Artificial Sequence
  Description of Artificial Sequence: Synthetic oligonucleotide
cctgccataaatatagggga

SEQ ID NO: 1772 - DNA, 20 bp, Artificial Sequence
  Description of Artificial Sequence: Synthetic oligonucleotide
ctgccataaatataggggat

SEQ ID NO: 1773 - DNA, 20 bp, Artificial Sequence
  Description of Artificial Sequence: Synthetic oligonucleotide
ataaatataggggatgggct

SEQ ID NO: 1774 - DNA, 20 bp, Artificial Sequence
  Description of Artificial Sequence: Synthetic oligonucleotide
taaatataggggatgggctt

SEQ ID NO: 1775 - DNA, 20 bp, Artificial Sequence
  Description of Artificial Sequence: Synthetic oligonucleotide
tgggcttctccagctcaatc

SEQ ID NO: 1776 - DNA, 20 bp, Artificial Sequence
  Description of Artificial Sequence: Synthetic oligonucleotide
agctcaatctggtgcagcag

SEQ ID NO: 1777 - DNA, 20 bp, Artificial Sequence
  Description of Artificial Sequence: Synthetic oligonucleotide
gctcaatctggtgcagcagt

SEQ ID NO: 1778 - DNA, 20 bp, Artificial Sequence
  Description of Artificial Sequence: Synthetic oligonucleotide
ctcaatctggtgcagcagtg

SEQ ID NO: 1779 - DNA, 20 bp, Artificial Sequence
  Description of Artificial Sequence: Synthetic oligonucleotide
cagtggggtgaaaatacgcc

SEQ ID NO: 1780 - DNA, 20 bp, Artificial Sequence
  Description of Artificial Sequence: Synthetic oligonucleotide
tgaaaatacgccaggcctca

SEQ ID NO: 1781 - DNA, 20 bp, Artificial Sequence
  Description of Artificial Sequence: Synthetic oligonucleotide
cctcacggagctcgtcgctg

SEQ ID NO: 1782 - DNA, 20 bp, Artificial Sequence
  Description of Artificial Sequence: Synthetic oligonucleotide
acctgcgcacgaagtgcatc

SEQ ID NO: 1783 - DNA, 20 bp, Artificial Sequence
  Description of Artificial Sequence: Synthetic oligonucleotide
ggctcccgcagaagacgtcc

SEQ ID NO: 1784 - DNA, 20 bp, Artificial Sequence
  Description of Artificial Sequence: Synthetic oligonucleotide
cgcagaagacgtccaggatg

SEQ ID NO: 1785 - DNA, 20 bp, Artificial Sequence
  Description of Artificial Sequence: Synthetic oligonucleotide
gtccaggatgaggcgctcat

SEQ ID NO: 1786 - DNA, 20 bp, Artificial Sequence
  Description of Artificial Sequence: Synthetic oligonucleotide
atgaggcgctcataggcgtc

SEQ ID NO: 1787 - DNA, 20 bp, Artificial Sequence
  Description of Artificial Sequence: Synthetic oligonucleotide
tgaggcgctcataggcgtca

SEQ ID NO: 1788 - DNA, 20 bp, Artificial Sequence
  Description of Artificial Sequence: Synthetic oligonucleotide
caccttgtatctgttgccgt

SEQ ID NO: 1789 - DNA, 20 bp, Artificial Sequence
  Description of Artificial Sequence: Synthetic oligonucleotide
tgtatctgttgccgtaggtc

SEQ ID NO: 1790 - DNA, 20 bp, Artificial Sequence
  Description of Artificial Sequence: Synthetic oligonucleotide
caggtccagctccgactcct

SEQ ID NO: 1791 - DNA, 20 bp, Artificial Sequence
  Description of Artificial Sequence: Synthetic oligonucleotide
aggtccagctccgactcctc

SEQ ID NO: 1792 - DNA, 20 bp, Artificial Sequence
  Description of Artificial Sequence: Synthetic oligonucleotide
ggtccagctccgactcctcg

SEQ ID NO: 1793 - DNA, 20 bp, Artificial Sequence
  Description of Artificial Sequence: Synthetic oligonucleotide
tcggggttgaagaacatgcc

SEQ ID NO: 1794 - DNA, 20 bp, Artificial Sequence
  Description of Artificial Sequence: Synthetic oligonucleotide
gaagaacatgcccggcttct

SEQ ID NO: 1795 - DNA, 20 bp, Artificial Sequence
  Description of Artificial Sequence: Synthetic oligonucleotide
cggcttcttggtcatcatct

SEQ ID NO: 1796 - DNA, 20 bp, Artificial Sequence
  Description of Artificial Sequence: Synthetic oligonucleotide
ggtcatcatcttggtgtaca

SEQ ID NO: 1797 - DNA, 20 bp, Artificial Sequence
  Description of Artificial Sequence: Synthetic oligonucleotide
cttggtgtacacggcctcgt

SEQ ID NO: 1798 - DNA, 20 bp, Artificial Sequence
  Description of Artificial Sequence: Synthetic oligonucleotide
ttggtgtacacggcctcgtt

SEQ ID NO: 1799 - DNA, 20 bp, Artificial Sequence
  Description of Artificial Sequence: Synthetic oligonucleotide
cggcctcgttgggctgcacg

SEQ ID NO: 1800 - DNA, 20 bp, Artificial Sequence
  Description of Artificial Sequence: Synthetic oligonucleotide
gctcgttgcgcttgcactgc

SEQ ID NO: 1801 - DNA, 20 bp, Artificial Sequence
  Description of Artificial Sequence: Synthetic oligonucleotide
cgttgcgcttgcactgctgg

SEQ ID NO: 1802 - DNA, 20 bp, Artificial Sequence
  Description of Artificial Sequence: Synthetic oligonucleotide
ctgctggtggaagatgtcgc

SEQ ID NO: 1803 - DNA, 20 bp, Artificial Sequence
  Description of Artificial Sequence: Synthetic oligonucleotide
agatgtcgccggccacatca

SEQ ID NO: 1804 - DNA, 20 bp, Artificial Sequence
  Description of Artificial Sequence: Synthetic oligonucleotide
atggaactgcagcctcacct

SEQ ID NO: 1805 - DNA, 20 bp, Artificial Sequence
  Description of Artificial Sequence: Synthetic oligonucleotide
cctcggccttgcgctcgttc

SEQ ID NO: 1806 - DNA, 20 bp, Artificial Sequence
  Description of Artificial Sequence: Synthetic oligonucleotide
ctcggccttgcgctcgttca

SEQ ID NO: 1807 - DNA, 20 bp, Artificial Sequence
  Description of Artificial Sequence: Synthetic oligonucleotide
tcagggccttgccgcagcgc

SEQ ID NO: 1808 - DNA, 20 bp, Artificial Sequence
  Description of Artificial Sequence: Synthetic oligonucleotide
cttgccgcagcgcaggatga

SEQ ID NO: 1809 - DNA, 20 bp, Artificial Sequence
  Description of Artificial Sequence: Synthetic oligonucleotide
ttgccgcagcgcaggatgaa

SEQ ID NO: 1810 - DNA, 20 bp, Artificial Sequence
  Description of Artificial Sequence: Synthetic oligonucleotide
gtatgagggcacctacaagt

SEQ ID NO: 1811 - DNA, 20 bp, Artificial Sequence
  Description of Artificial Sequence: Synthetic oligonucleotide
agtatgagggcacctacaag

SEQ ID NO: 1812 - DNA, 20 bp, Artificial Sequence
  Description of Artificial Sequence: Synthetic oligonucleotide
agagtgggtttccagtatga

SEQ ID NO: 1813 - DNA, 20 bp, Artificial Sequence
  Description of Artificial Sequence: Synthetic oligonucleotide
gagagtgggtttccagtatg

SEQ ID NO: 1814 - DNA, 20 bp, Artificial Sequence
  Description of Artificial Sequence: Synthetic oligonucleotide
gacgagctgatgaagagagt

SEQ ID NO: 1815 - DNA, 20 bp, Artificial Sequence
  Description of Artificial Sequence: Synthetic oligonucleotide
agacgagctgatgaagagag

SEQ ID NO: 1816 - DNA, 20 bp, Artificial Sequence
  Description of Artificial Sequence: Synthetic oligonucleotide
ctccagccgaggccccacgg

SEQ ID NO: 1817 - DNA, 20 bp, Artificial Sequence
  Description of Artificial Sequence: Synthetic oligonucleotide
cacccgtcactctccagccg

SEQ ID NO: 1818 - DNA, 20 bp, Artificial Sequence
  Description of Artificial Sequence: Synthetic oligonucleotide
ccatcccctatatttatggc

SEQ ID NO: 1819 - DNA, 20 bp, Artificial Sequence
  Description of Artificial Sequence: Synthetic oligonucleotide
aagcccatcccctatattta

SEQ ID NO: 1820 - DNA, 20 bp, Artificial Sequence
  Description of Artificial Sequence: Synthetic oligonucleotide
actgctgcaccagattgagc

SEQ ID NO: 1821 - DNA, 20 bp, Artificial Sequence
  Description of Artificial Sequence: Synthetic oligonucleotide
gcgacgagctccgtgaggcc

SEQ ID NO: 1822 - DNA, 20 bp, Artificial Sequence
  Description of Artificial Sequence: Synthetic oligonucleotide
cctcagcgacgagctccgtg

SEQ ID NO: 1823 - DNA, 20 bp, Artificial Sequence
  Description of Artificial Sequence: Synthetic oligonucleotide
gccagatgcacttcgtgcgc

SEQ ID NO: 1824 - DNA, 20 bp, Artificial Sequence
  Description of Artificial Sequence: Synthetic oligonucleotide
tcatcctggacgtcttctgc

SEQ ID NO: 1825 - DNA, 20 bp, Artificial Sequence
  Description of Artificial Sequence: Synthetic oligonucleotide
ctcatcctggacgtcttctg

SEQ ID NO: 1826 - DNA, 20 bp, Artificial Sequence
  Description of Artificial Sequence: Synthetic oligonucleotide
cgcctatgagcgcctcatcc

SEQ ID NO: 1827 - DNA, 20 bp, Artificial Sequence
  Description of Artificial Sequence: Synthetic oligonucleotide
gacctacggcaacagataca

SEQ ID NO: 1828 - DNA, 20 bp, Artificial Sequence
  Description of Artificial Sequence: Synthetic oligonucleotide
tcggagctggacctgaccta

SEQ ID NO: 1829 - DNA, 20 bp, Artificial Sequence
  Description of Artificial Sequence: Synthetic oligonucleotide
caaccccgaggagtcggagc

SEQ ID NO: 1830 - DNA, 20 bp, Artificial Sequence
  Description of Artificial Sequence: Synthetic oligonucleotide
gttcttcaaccccgaggagt

SEQ ID NO: 1831 - DNA, 20 bp, Artificial Sequence
  Description of Artificial Sequence: Synthetic oligonucleotide
gggcatgttcttcaaccccg

SEQ ID NO: 1832 - DNA, 20 bp, Artificial Sequence
  Description of Artificial Sequence: Synthetic oligonucleotide
aagatgatgaccaagaagcc

SEQ ID NO: 1833 - DNA, 20 bp, Artificial Sequence
  Description of Artificial Sequence: Synthetic oligonucleotide
caagatgatgaccaagaagc

SEQ ID NO: 1834 - DNA, 20 bp, Artificial Sequence
  Description of Artificial Sequence: Synthetic oligonucleotide
gatccgcgtgcagcccaacg

SEQ ID NO: 1835 - DNA, 20 bp, Artificial Sequence
  Description of Artificial Sequence: Synthetic oligonucleotide
gcagtgcaagcgcaacgagc

SEQ ID NO: 1836 - DNA, 20 bp, Artificial Sequence
  Description of Artificial Sequence: Synthetic oligonucleotide
ctgcagttccatgatgtggc

SEQ ID NO: 1837 - DNA, 20 bp, Artificial Sequence
  Description of Artificial Sequence: Synthetic oligonucleotide
gaggctgcagttccatgatg

SEQ ID NO: 1838 - DNA, 20 bp, Artificial Sequence
  Description of Artificial Sequence: Synthetic oligonucleotide
acgagcgcaaggccgaggtg

SEQ ID NO: 1839 - DNA, 20 bp, Artificial Sequence
  Description of Artificial Sequence: Synthetic oligonucleotide
cctgaacgagcgcaaggccg

SEQ ID NO: 1840 - DNA, 20 bp, Artificial Sequence
  Description of Artificial Sequence: Synthetic oligonucleotide
caaggccctgaacgagcgca

SEQ ID NO: 1841 - DNA, 20 bp, Artificial Sequence
  Description of Artificial Sequence: Synthetic oligonucleotide
cttcatcctgcgctgcggca

SEQ ID NO: 1842 - DNA, 20 bp, Artificial Sequence
  Description of Artificial Sequence: Synthetic oligonucleotide
gtgcccttcatcctgcgctg

SEQ ID NO: 1843 - DNA, 20 bp, Artificial Sequence
  Description of Artificial Sequence: Synthetic oligonucleotide
agaatgagaggtgggatggt

SEQ ID NO: 1844 - DNA, 20 bp, Artificial Sequence
  Description of Artificial Sequence: Synthetic oligonucleotide
gtggagaatgagaggtggga

SEQ ID NO: 1845 - DNA, 20 bp, Artificial Sequence
  Description of Artificial Sequence: Synthetic oligonucleotide
cttaatgaaaccataaaaat

SEQ ID NO: 1846 - DNA, 20 bp, Artificial Sequence
  Description of Artificial Sequence: Synthetic oligonucleotide
gactaagcttaattgctttc

SEQ ID NO: 1847 - DNA, 20 bp, Artificial Sequence
  Description of Artificial Sequence: Synthetic oligonucleotide
gcttaattgctttctggaac

SEQ ID NO: 1848 - DNA, 20 bp, Artificial Sequence
  Description of Artificial Sequence: Synthetic oligonucleotide
tctggaacaggatctgaaac

SEQ ID NO: 1849 - DNA, 20 bp, Artificial Sequence
  Description of Artificial Sequence: Synthetic oligonucleotide
ctgaaactggatatcccaac

SEQ ID NO: 1850 - DNA, 20 bp, Artificial Sequence
  Description of Artificial Sequence: Synthetic oligonucleotide
ttaaaggtacgacaccacag

SEQ ID NO: 1851 - DNA, 20 bp, Artificial Sequence
  Description of Artificial Sequence: Synthetic oligonucleotide
ttatttatacccatcaacac

SEQ ID NO: 1852 - DNA, 20 bp, Artificial Sequence
  Description of Artificial Sequence: Synthetic oligonucleotide
atctccttgatcagctgaaa

SEQ ID NO: 1853 - DNA, 20 bp, Artificial Sequence
  Description of Artificial Sequence: Synthetic oligonucleotide
caacaaagaagagacaattc

SEQ ID NO: 1854 - DNA, 20 bp, Artificial Sequence
  Description of Artificial Sequence: Synthetic oligonucleotide
ttaggatgtggatgtagaag

SEQ ID NO: 1855 - DNA, 20 bp, Artificial Sequence
  Description of Artificial Sequence: Synthetic oligonucleotide
ggatgtagaagaggcagttc

SEQ ID NO: 1856 - DNA, 20 bp, Artificial Sequence
  Description of Artificial Sequence: Synthetic oligonucleotide
gatgtagaagaggcagttct

SEQ ID NO: 1857 - DNA, 20 bp, Artificial Sequence
  Description of Artificial Sequence: Synthetic oligonucleotide
atgtagaagaggcagttctg

SEQ ID NO: 1858 - DNA, 20 bp, Artificial Sequence
  Description of Artificial Sequence: Synthetic oligonucleotide
caagagccatctgtagatgc

SEQ ID NO: 1859 - DNA, 20 bp, Artificial Sequence
  Description of Artificial Sequence: Synthetic oligonucleotide
gccatctgtagatgctggtg

SEQ ID NO: 1860 - DNA, 20 bp, Artificial Sequence
  Description of Artificial Sequence: Synthetic oligonucleotide
ggtgtggattgttcatcaat

SEQ ID NO: 1861 - DNA, 20 bp, Artificial Sequence
  Description of Artificial Sequence: Synthetic oligonucleotide
gtggattgttcatcaattgg

SEQ ID NO: 1862 - DNA, 20 bp, Artificial Sequence
  Description of Artificial Sequence: Synthetic oligonucleotide
tggattgttcatcaattggc

SEQ ID NO: 1863 - DNA, 20 bp, Artificial Sequence
  Description of Artificial Sequence: Synthetic oligonucleotide
ggattgttcatcaattggcg

SEQ ID NO: 1864 - DNA, 20 bp, Artificial Sequence
  Description of Artificial Sequence: Synthetic oligonucleotide
tggcggggttccatttttcc

SEQ ID NO: 1865 - DNA, 20 bp, Artificial Sequence
  Description of Artificial Sequence: Synthetic oligonucleotide
ccacagcataaaaaatcaca

SEQ ID NO: 1866 - DNA, 20 bp, Artificial Sequence
  Description of Artificial Sequence: Synthetic oligonucleotide
ggaaaagacaaagaaaacag

SEQ ID NO: 1867 - DNA, 20 bp, Artificial Sequence
  Description of Artificial Sequence: Synthetic oligonucleotide
aaacagaggcattaacacac

SEQ ID NO: 1868 - DNA, 20 bp, Artificial Sequence
  Description of Artificial Sequence: Synthetic oligonucleotide
gaggcattaacacactggag

SEQ ID NO: 1869 - DNA, 20 bp, Artificial Sequence
  Description of Artificial Sequence: Synthetic oligonucleotide
cacactggagaggtctaaag

SEQ ID NO: 1870 - DNA, 20 bp, Artificial Sequence
  Description of Artificial Sequence: Synthetic oligonucleotide
ggaagaaactacagagcact

SEQ ID NO: 1871 - DNA, 20 bp, Artificial Sequence
  Description of Artificial Sequence: Synthetic oligonucleotide
cttagtcaaaccaattttta

SEQ ID NO: 1872 - DNA, 20 bp, Artificial Sequence
  Description of Artificial Sequence: Synthetic oligonucleotide
tctcttttaaagtacctgtt

SEQ ID NO: 1873 - DNA, 20 bp, Artificial Sequence
  Description of Artificial Sequence: Synthetic oligonucleotide
ttctcttttaaagtacctgt

SEQ ID NO: 1874 - DNA, 20 bp, Artificial Sequence
  Description of Artificial Sequence: Synthetic oligonucleotide
tataaataacttttcctctg

SEQ ID NO: 1875 - DNA, 20 bp, Artificial Sequence
  Description of Artificial Sequence: Synthetic oligonucleotide
cagttcttaccagtgttgat

SEQ ID NO: 1876 - DNA, 20 bp, Artificial Sequence
  Description of Artificial Sequence: Synthetic oligonucleotide
tcagttcttaccagtgttga

SEQ ID NO: 1877 - DNA, 20 bp, Artificial Sequence
  Description of Artificial Sequence: Synthetic oligonucleotide
tgatcaaggagatgttcacg

SEQ ID NO: 1878 - DNA, 20 bp, Artificial Sequence
  Description of Artificial Sequence: Synthetic oligonucleotide
gtttccttttcagctgatca

SEQ ID NO: 1879 - DNA, 20 bp, Artificial Sequence
  Description of Artificial Sequence: Synthetic oligonucleotide
tttagcatcattaacagctc

SEQ ID NO: 1880 - DNA, 20 bp, Artificial Sequence
  Description of Artificial Sequence: Synthetic oligonucleotide
acagatggctcttgacttag

SEQ ID NO: 1881 - DNA, 20 bp, Artificial Sequence
  Description of Artificial Sequence: Synthetic oligonucleotide
tccacaccagcatctacaga

SEQ ID NO: 1882 - DNA, 20 bp, Artificial Sequence
  Description of Artificial Sequence: Synthetic oligonucleotide
atatgacatacctggaaaaa

SEQ ID NO: 1883 - DNA, 20 bp, Artificial Sequence
  Description of Artificial Sequence: Synthetic oligonucleotide
aggttgatctgggctcgcag

SEQ ID NO: 1884 - DNA, 20 bp, Artificial Sequence
  Description of Artificial Sequence: Synthetic oligonucleotide
agtgaattaaaggttgatct

SEQ ID NO: 1885 - DNA, 20 bp, Artificial Sequence
  Description of Artificial Sequence: Synthetic oligonucleotide
aagtgaattaaaggttgatc

SEQ ID NO: 1886 - RNA, 50 nt, Artificial Sequence
  Description of Artificial Sequence: Synthetic oligonucleotide
aaaaaaaaaaaaaaaaaaaaaaaaaaaaaaaaaaaaaaaaaaaaaaaaaa

SEQ ID NO: 1887 - DNA, 17 bp, Artificial Sequence
  Description of Artificial Sequence: Synthetic oligonucleotide
aaataaaatacgaaatg

SEQ ID NO: 1888 - DNA, 132 bp, Homo sapiens
tcaagctcatttcctggtatgtggctggggccagagactggctcttaaaaagtgcagggtctggcgccctctggtggctggctcagaaaaagggccctgacaactcttttcatcttctaggtatgacaacga

SEQ ID NO: 1889 - DNA, 218 bp, Homo sapiens
ttgagaggttgggaggcagggaaggcgtttctcacttgagaaatgacaagagacccaaagagggggttaatgggcaagagctgggccttaggaaccctgcctcactaggccatacccaagctgtcctgcttgggctgcttctgacaggaaaggcttcacacggactttgatattgttggtccttaaactctaccaaggcaggagggtggtgggtaata

SEQ ID NO: 1890 - DNA, 218 bp, Homo sapiens
gtgtggatgaccattttgaccacttcccccctcctttcaggtcaaggccttcttggctgatccatctgcctttgtggctgctgcccctgtggctgctgccaccacagctgctcctgctgctgctgcagccccagctaaggttgaagccaaggaagagtcggaggagtcggacgaggatatgggatttggtctctttgactaatcaccaaaaagcaacc

SEQ ID NO: 1891 - protein, 53 aa, Homo sapiens
VKAFLADPSAFVAAAPVAAATTAAPAAAAAPAKVEAKEESEESDEDMGFGLFD

SEQ ID NO: 1892 - DNA, 138 bp, Homo sapiens
aggggctggtgctgaggggggcatctcactcctggacaggcctggcaggtgccttgctcacagagtactcttaactggcaaaggaccagccggggttggggtgggatgcagtccatgtaatgagggcaatgcaacccc

SEQ ID NO: 1893 - DNA, 138 bp, Homo sapiens
tcctgaccaccaccacctgcacttattcttggcagaggctacggaaacaggccgagaagaacgtggagaagaaaattgacaaatacacagaggtcctcaagacccacggactcctggtctgagcccaataaagactgt

SEQ ID NO: 1894 - protein, 28 aa, Homo sapiens
RLRKQAEKNVEKKIDKYTEVLKTHGLLV

SEQ ID NO: 1895 - DNA, 288 bp, Homo sapiens
aactttttgcaactttaataatcttaaataaccttaaaatatttaggtaaatacggcatcatctgcatggaggatttgattcatgagatctatactgttggaaaacgcttcaaagaggcaaataacttcctgtggcccttcaaattgtcttctccacgaggtggaatgaagaaaaagaccacccattttgtagaaggtggagatgctggcaacagggaggaccagatcaacaggcttattagaagaatgaactaaggtgagagacctcatcctgagaaaggttgagtt

SEQ ID NO: 1896 - protein, 69 aa, Homo sapiens [sequence omitted]

SEQ ID NO: 1897 - RNA, 60 nt, Artificial Sequence
  Description of Artificial Sequence: Synthetic oligonucleotide
aaaaaaaaaaaaaaaaaaaaaaaaaaaaaaaaaaaaaaaaaaaaaaaaaaaaaaaaaaaa

SEQ ID NO: 1898 - RNA, 70 nt, Artificial Sequence
  Description of Artificial Sequence: Synthetic oligonucleotide
aaaaaaaaaaaaaaaaaaaaaaaaaaaaaaaaaaaaaaaaaaaaaaaaaaaaaaaaaaaaaaaaaaaaaa

SEQ ID NO: 1899 - RNA, 100 nt, Artificial Sequence
  Description of Artificial Sequence: Synthetic polynucleotide
aaaaaaaaaaaaaaaaaaaaaaaaaaaaaaaaaaaaaaaaaaaaaaaaaaaaaaaaaaaaaaaaaaaaaaaaaaaaaaaaaaaaaaaaaaaaaaaaaaaa

SEQ ID NO: 1900 - RNA, 200 nt, Artificial Sequence
  Description of Artificial Sequence: Synthetic polynucleotide
aaaaaaaaaaaaaaaaaaaaaaaaaaaaaaaaaaaaaaaaaaaaaaaaaaaaaaaaaaaaaaaaaaaaaaaaaaaaaaaaaaaaaaaaaaaaaaaaaaaaaaaaaaaaaaaaaaaaaaaaaaaaaaaaaaaaaaaaaaaaaaaaaaaaaaaaaaaaaaaaaaaaaaaaaaaaaaaaaaaaaaaaaaaaaaaaaaaaaaaa

SEQ ID NO: 1901 - RNA, 500 nt, Artificial Sequence
  Description of Artificial Sequence: Synthetic polynucleotide
aaaaaaaaaaaaaaaaaaaaaaaaaaaaaaaaaaaaaaaaaaaaaaaaaaaaaaaaaaaaaaaaaaaaaaaaaaaaaaaaaaaaaaaaaaaaaaaaaaaaaaaaaaaaaaaaaaaaaaaaaaaaaaaaaaaaaaaaaaaaaaaaaaaaaaaaaaaaaaaaaaaaaaaaaaaaaaaaaaaaaaaaaaaaaaaaaaaaaaaaaaaaaaaaaaaaaaaaaaaaaaaaaaaaaaaaaaaaaaaaaaaaaaaaaaaaaaaaaaaaaaaaaaaaaaaaaaaaaaaaaaaaaaaaaaaaaaaaaaaaaaaaaaaaaaaaaaaaaaaaaaaaaaaaaaaaaaaaaaaaaaaaaaaaaaaaaaaaaaaaaaaaaaaaaaaaaaaaaaaaaaaaaaaaaaaaaaaaaaaaaaaaaaaaaaaaaaaaaaaaaaaaaaaaaaaaaaaaaaaaaaaaaaaaaaaaaaaaaaaaaaaaaaaaaaaaaaaaaaaaaaaaaaaaaaaaaaaaaaaa

SEQ ID NO: 1902 - RNA, 1000 nt, Artificial Sequence
  Description of Artificial Sequence: Synthetic polynucleotide
aaaaaaaaaaaaaaaaaaaaaaaaaaaaaaaaaaaaaaaaaaaaaaaaaaaaaaaaaaaaaaaaaaaaaaaaaaaaaaaaaaaaaaaaaaaaaaaaaaaaaaaaaaaaaaaaaaaaaaaaaaaaaaaaaaaaaaaaaaaaaaaaaaaaaaaaaaaaaaaaaaaaaaaaaaaaaaaaaaaaaaaaaaaaaaaaaaaaaaaaaaaaaaaaaaaaaaaaaaaaaaaaaaaaaaaaaaaaaaaaaaaaaaaaaaaaaaaaaaaaaaaaaaaaaaaaaaaaaaaaaaaaaaaaaaaaaaaaaaaaaaaaaaaaaaaaaaaaaaaaaaaaaaaaaaaaaaaaaaaaaaaaaaaaaaaaaaaaaaaaaaaaaaaaaaaaaaaaaaaaaaaaaaaaaaaaaaaaaaaaaaaaaaaaaaaaaaaaaaaaaaaaaaaaaaaaaaaaaaaaaaaaaaaaaaaaaaaaaaaaaaaaaaaaaaaaaaaaaaaaaaaaaaaaaaaaaaaaaaaaaaaaaaaaaaaaaaaaaaaaaaaaaaaaaaaaaaaaaaaaaaaaaaaaaaaaaaaaaaaaaaaaaaaaaaaaaaaaaaaaaaaaaaaaaaaaaaaaaaaaaaaaaaaaaaaaaaaaaaaaaaaaaaaaaaaaaaaaaaaaaaaaaaaaaaaaaaaaaaaaaaaaaaaaaaaaaaaaaaaaaaaaaaaaaaaaaaaaaaaaaaaaaaaaaaaaaaaaaaaaaaaaaaaaaaaaaaaaaaaaaaaaaaaaaaaaaaaaaaaaaaaaaaaaaaaaaaaaaaaaaaaaaaaaaaaaaaaaaaaaaaaaaaaaaaaaaaaaaaaaaaaaaaaaaaaaaaaaaaaaaaaaaaaaaaaaaaaaaaaaaaaaaaaaaaaaaaaaaaaaaaaaaaaaaaaaaaaaaaaaaaaaaaaaaaaaaaaaaaaaaaaaaaaaaaaaaaaaaaaaaaaaaaaaaaaaaaaaaaaaaaaaaaaaaaaaaaaaaaaaaaaaaaaaaaaaaaaaaaaa

SEQ ID NO: 1903 - RNA, 2000 nt, Artificial Sequence
  Description of Artificial Sequence: Synthetic polynucleotide
aaaaaaaaaaaaaaaaaaaaaaaaaaaaaaaaaaaaaaaaaaaaaaaaaaaaaaaaaaaaaaaaaaaaaaaaaaaaaaaaaaaaaaaaaaaaaaaaaaaaaaaaaaaaaaaaaaaaaaaaaaaaaaaaaaaaaaaaaaaaaaaaaaaaaaaaaaaaaaaaaaaaaaaaaaaaaaaaaaaaaaaaaaaaaaaaaaaaaaaaaaaaaaaaaaaaaaaaaaaaaaaaaaaaaaaaaaaaaaaaaaaaaaaaaaaaaaaaaaaaaaaaaaaaaaaaaaaaaaaaaaaaaaaaaaaaaaaaaaaaaaaaaaaaaaaaaaaaaaaaaaaaaaaaaaaaaaaaaaaaaaaaaaaaaaaaaaaaaaaaaaaaaaaaaaaaaaaaaaaaaaaaaaaaaaaaaaaaaaaaaaaaaaaaaaaaaaaaaaaaaaaaaaaaaaaaaaaaaaaaaaaaaaaaaaaaaaaaaaaaaaaaaaaaaaaaaaaaaaaaaaaaaaaaaaaaaaaaaaaaaaaaaaaaaaaaaaaaaaaaaaaaaaaaaaaaaaaaaaaaaaaaaaaaaaaaaaaaaaaaaaaaaaaaaaaaaaaaaaaaaaaaaaaaaaaaaaaaaaaaaaaaaaaaaaaaaaaaaaaaaaaaaaaaaaaaaaaaaaaaaaaaaaaaaaaaaaaaaaaaaaaaaaaaaaaaaaaaaaaaaaaaaaaaaaaaaaaaaaaaaaaaaaaaaaaaaaaaaaaaaaaaaaaaaaaaaaaaaaaaaaaaaaaaaaaaaaaaaaaaaaaaaaaaaaaaaaaaaaaaaaaaaaaaaaaaaaaaaaaaaaaaaaaaaaaaaaaaaaaaaaaaaaaaaaaaaaaaaaaaaaaaaaaaaaaaaaaaaaaaaaaaaaaaaaaaaaaaaaaaaaaaaaaaaaaaaaaaaaaaaaaaaaaaaaaaaaaaaaaaaaaaaaaaaaaaaaaaaaaaaaaaaaaaaaaaaaaaaaaaaaaaaaaaaaaaaaaaaaaaaaaaaaaaaaaaaaaaaaaaaaaaaaaaaaaaaaaaaaaaaaaaaaaaaaaaaaaaaaaaaaaaaaaaaaaaaaaaaaaaaaaaaaaaaaaaaaaaaaaaaaaaaaaaaaaaaaaaaaaaaaaaaaaaaaaaaaaaaaaaaaaaaaaaaaaaaaaaaaaaaaaaaaaaaaaaaaaaaaaaaaaaaaaaaaaaaaaaaaaaaaaaaaaaaaaaaaaaaaaaaaaaaaaaaaaaaaaaaaaaaaaaaaaaaaaaaaaaaaaaaaaaaaaaaaaaaaaaaaaaaaaaaaaaaaaaaaaaaaaaaaaaaaaaaaaaaaaaaaaaaaaaaaaaaaaaaaaaaaaaaaaaaaaaaaaaaaaaaaaaaaaaaaaaaaaaaaaaaaaaaaaaaaaaaaaaaaaaaaaaaaaaaaaaaaaaaaaaaaaaaaaaaaaaaaaaaaaaaaaaaaaaaaaaaaaaaaaaaaaaaaaaaaaaaaaaaaaaaaaaaaaaaaaaaaaaaaaaaaaaaaaaaaaaaaaaaaaaaaaaaaaaaaaaaaaaaaaaaaaaaaaaaaaaaaaaaaaaaaaaaaaaaaaaaaaaaaaaaaaaaaaaaaaaaaaaaaaaaaaaaaaaaaaaaaaaaaaaaaaaaaaaaaaaaaaaaaaaaaaaaaaaaaaaaaaaaaaaaaaaaaaaaaaaaaaaaaaaaaaaaaaaaaaaaaaaaaaaaaaaaaaaaaaaaaaaaaaaaaaaaaaaaaaaaaaaaaaaaaaaaaaaaaaaaaaaaaaaaaaaaaaaaaaaaaaaaaaaaaaaaaaaaaaaaaaaaaaaaaaaaaaaaaaaaaaaaaaaaaaaaaaaaaaaaaaaaaaaaaaaaaaaaaaaaaaaaaaaaaaaaaaaaaaaaaaaaaaaaaaaaaaaaaaaaaaaaaaaaaaaaaaaaaaaaaaaaaaaaaaaaaaaaaaaaaaaaaaaaaaaaaaaaaaaaaaaaaaaaaaaaaaaaaaaaaaaaaaaaaaaaaaaaaaaaaaaaaaaaaaaaaaaaaaaaaaaaaaaaaaa

SEQ ID NO: 1904 - RNA, 3000 nt, Artificial Sequence
  Description of Artificial Sequence: Synthetic polynucleotide
aaaaaaaaaaaaaaaaaaaaaaaaaaaaaaaaaaaaaaaaaaaaaaaaaaaaaaaaaaaaaaaaaaaaaaaaaaaaaaaaaaaaaaaaaaaaaaaaaaaaaaaaaaaaaaaaaaaaaaaaaaaaaaaaaaaaaaaaaaaaaaaaaaaaaaaaaaaaaaaaaaaaaaaaaaaaaaaaaaaaaaaaaaaaaaaaaaaaaaaaaaaaaaaaaaaaaaaaaaaaaaaaaaaaaaaaaaaaaaaaaaaaaaaaaaaaaaaaaaaaaaaaaaaaaaaaaaaaaaaaaaaaaaaaaaaaaaaaaaaaaaaaaaaaaaaaaaaaaaaaaaaaaaaaaaaaaaaaaaaaaaaaaaaaaaaaaaaaaaaaaaaaaaaaaaaaaaaaaaaaaaaaaaaaaaaaaaaaaaaaaaaaaaaaaaaaaaaaaaaaaaaaaaaaaaaaaaaaaaaaaaaaaaaaaaaaaaaaaaaaaaaaaaaaaaaaaaaaaaaaaaaaaaaaaaaaaaaaaaaaaaaaaaaaaaaaaaaaaaaaaaaaaaaaaaaaaaaaaaaaaaaaaaaaaaaaaaaaaaaaaaaaaaaaaaaaaaaaaaaaaaaaaaaaaaaaaaaaaaaaaaaaaaaaaaaaaaaaaaaaaaaaaaaaaaaaaaaaaaaaaaaaaaaaaaaaaaaaaaaaaaaaaaaaaaaaaaaaaaaaaaaaaaaaaaaaaaaaaaaaaaaaaaaaaaaaaaaaaaaaaaaaaaaaaaaaaaaaaaaaaaaaaaaaaaaaaaaaaaaaaaaaaaaaaaaaaaaaaaaaaaaaaaaaaaaaaaaaaaaaaaaaaaaaaaaaaaaaaaaaaaaaaaaaaaaaaaaaaaaaaaaaaaaaaaaaaaaaaaaaaaaaaaaaaaaaaaaaaaaaaaaaaaaaaaaaaaaaaaaaaaaaaaaaaaaaaaaaaaaaaaaaaaaaaaaaaaaaaaaaaaaaaaaaaaaaaaaaaaaaaaaaaaaaaaaaaaaaaaaaaaaaaaaaaaaaaaaaaaaaaaaaaaaaaaaaaaaaaaaaaaaaaaaaaaaaaaaaaaaaaaaaaaaaaaaaaaaaaaaaaaaaaaaaaaaaaaaaaaaaaaaaaaaaaaaaaaaaaaaaaaaaaaaaaaaaaaaaaaaaaaaaaaaaaaaaaaaaaaaaaaaaaaaaaaaaaaaaaaaaaaaaaaaaaaaaaaaaaaaaaaaaaaaaaaaaaaaaaaaaaaaaaaaaaaaaaaaaaaaaaaaaaaaaaaaaaaaaaaaaaaaaaaaaaaaaaaaaaaaaaaaaaaaaaaaaaaaaaaaaaaaaaaaaaaaaaaaaaaaaaaaaaaaaaaaaaaaaaaaaaaaaaaaaaaaaaaaaaaaaaaaaaaaaaaaaaaaaaaaaaaaaaaaaaaaaaaaaaaaaaaaaaaaaaaaaaaaaaaaaaaaaaaaaaaaaaaaaaaaaaaaaaaaaaaaaaaaaaaaaaaaaaaaaaaaaaaaaaaaaaaaaaaaaaaaaaaaaaaaaaaaaaaaaaaaaaaaaaaaaaaaaaaaaaaaaaaaaaaaaaaaaaaaaaaaaaaaaaaaaaaaaaaaaaaaaaaaaaaaaaaaaaaaaaaaaaaaaaaaaaaaaaaaaaaaaaaaaaaaaaaaaaaaaaaaaaaaaaaaaaaaaaaaaaaaaaaaaaaaaaaaaaaaaaaaaaaaaaaaaaaaaaaaaaaaaaaaaaaaaaaaaaaaaaaaaaaaaaaaaaaaaaaaaaaaaaaaaaaaaaaaaaaaaaaaaaaaaaaaaaaaaaaaaaaaaaaaaaaaaaaaaaaaaaaaaaaaaaaaaaaaaaaaaaaaaaaaaaaaaaaaaaaaaaaaaaaaaaaaaaaaaaaaaaaaaaaaaaaaaaaaaaaaaaaaaaaaaaaaaaaaaaaaaaaaaaaaaaaaaaaaaaaaaaaaaaaaaaaaaaaaaaaaaaaaaaaaaaaaaaaaaaaaaaaaaaaaaaaaaaaaaaaaaaaaaaaaaaaaaaaaaaaaaaaaaaaaaaaaaaaaaaaaaaaaaaaaaaaaaaaaaaaaaaaaaaaaaaaaaaaaaaaaaaaaaaaaaaaaaaaaaaaaaaaaaaaaaaaaaaaaaaaaaaaaaaaaaaaaaaaaaaaaaaaaaaaaaaaaaaaaaaaaaaaaaaaaaaaaaaaaaaaaaaaaaaaaaaaaaaaaaaaaaaaaaaaaaaaaaaaaaaaaaaaaaaaaaaaaaaaaaaaaaaaaaaaaaaaaaaaaaaaaaaaaaaaaaaaaaaaaaaaaaaaaaaaaaaaaaaaaaaaaaaaaaaaaaaaaaaaaaaaaaaaaaaaaaaaaaaaaaaaaaaaaaaaaaaaaaaaaaaaaaaaaaaaaaaaaaaaaaaaaaaaaaaaaaaaaaaaaaaaaaaaaaaaaaaaaaaaaaaaaaaaaaaaaaaaaaaaaaaaaaaaaaaaaaaaaaaaaaaaaaaaaaaaaaaaaaaaaaaaaaaaaaaaaaaaaaaaaaaaaaaaaaaaaaaaaaaaaaaaaaaaaaaaaaaaaaaaaaaaaaaaaaaaaaaaaaaaaaaaaaaaaaaaaaaaaaaaaaaaaaaaaaaaaaaaaaaaaaaaaaaaaaaaaaaaaaaaaaaaaaaaaaaaaaaaaaaaaaaaaaaaaaaaaaaaaaaaaaaaaaaaaaaaaaaaaaaaaaaaaaaaaaaaaaaaaaaaaaaaaaaaaaaaaaaaaaaaaaaaaaaaaaaaaaaaaaaaaaaaaaaaaaaaaaaaaaaaaaaaaaaaaaaaaaaaaaaaaaaaaaaaaaaaaaaaaaaaaaaaaaaaaaaaaaaaaaaaaaaaaaaaaaaaaaaaaaaaaaaaaaaaaaaaaaaaaaaaaaaaaaaaaaaaaaaaaaaaaaaaaaaaaaaaaaaaaaaaaaaaaaaaaaaaaaaaaaaaaaaaaaaaaaaaaaaaaaaaaaaaaaaaaaaaaaaaaaaaaaaaaaaaaaaaaaaaaaaaaaaaaaaaaaaaaaaaaaaaaaaaaaaaaaaaaaaaaaaaaaaaaaaaaaaaaaaaaaaaaaaaaaaaaaaaaaaaaa

SEQ ID NO: 1905 - RNA, 4000 nt, Artificial Sequence
  Description of Artificial Sequence: Synthetic polynucleotide
aaaaaaaaaaaaaaaaaaaaaaaaaaaaaaaaaaaaaaaaaaaaaaaaaaaaaaaaaaaaaaaaaaaaaaaaaaaaaaaaaaaaaaaaaaaaaaaaaaaaaaaaaaaaaaaaaaaaaaaaaaaaaaaaaaaaaaaaaaaaaaaaaaaaaaaaaaaaaaaaaaaaaaaaaaaaaaaaaaaaaaaaaaaaaaaaaaaaaaaaaaaaaaaaaaaaaaaaaaaaaaaaaaaaaaaaaaaaaaaaaaaaaaaaaaaaaaaaaaaaaaaaaaaaaaaaaaaaaaaaaaaaaaaaaaaaaaaaaaaaaaaaaaaaaaaaaaaaaaaaaaaaaaaaaaaaaaaaaaaaaaaaaaaaaaaaaaaaaaaaaaaaaaaaaaaaaaaaaaaaaaaaaaaaaaaaaaaaaaaaaaaaaaaaaaaaaaaaaaaaaaaaaaaaaaaaaaaaaaaaaaaaaaaaaaaaaaaaaaaaaaaaaaaaaaaaaaaaaaaaaaaaaaaaaaaaaaaaaaaaaaaaaaaaaaaaaaaaaaaaaaaaaaaaaaaaaaaaaaaaaaaaaaaaaaaaaaaaaaaaaaaaaaaaaaaaaaaaaaaaaaaaaaaaaaaaaaaaaaaaaaaaaaaaaaaaaaaaaaaaaaaaaaaaaaaaaaaaaaaaaaaaaaaaaaaaaaaaaaaaaaaaaaaaaaaaaaaaaaaaaaaaaaaaaaaaaaaaaaaaaaaaaaaaaaaaaaaaaaaaaaaaaaaaaaaaaaaaaaaaaaaaaaaaaaaaaaaaaaaaaaaaaaaaaaaaaaaaaaaaaaaaaaaaaaaaaaaaaaaaaaaaaaaaaaaaaaaaaaaaaaaaaaaaaaaaaaaaaaaaaaaaaaaaaaaaaaaaaaaaaaaaaaaaaaaaaaaaaaaaaaaaaaaaaaaaaaaaaaaaaaaaaaaaaaaaaaaaaaaaaaaaaaaaaaaaaaaaaaaaaaaaaaaaaaaaaaaaaaaaaaaaaaaaaaaaaaaaaaaaaaaaaaaaaaaaaaaaaaaaaaaaaaaaaaaaaaaaaaaaaaaaaaaaaaaaaaaaaaaaaaaaaaaaaaaaaaaaaaaaaaaaaaaaaaaaaaaaaaaaaaaaaaaaaaaaaaaaaaaaaaaaaaaaaaaaaaaaaaaaaaaaaaaaaaaaaaaaaaaaaaaaaaaaaaaaaaaaaaaaaaaaaaaaaaaaaaaaaaaaaaaaaaaaaaaaaaaaaaaaaaaaaaaaaaaaaaaaaaaaaaaaaaaaaaaaaaaaaaaaaaaaaaaaaaaaaaaaaaaaaaaaaaaaaaaaaaaaaaaaaaaaaaaaaaaaaaaaaaaaaaaaaaaaaaaaaaaaaaaaaaaaaaaaaaaaaaaaaaaaaaaaaaaaaaaaaaaaaaaaaaaaaaaaaaaaaaaaaaaaaaaaaaaaaaaaaaaaaaaaaaaaaaaaaaaaaaaaaaaaaaaaaaaaaaaaaaaaaaaaaaaaaaaaaaaaaaaaaaaaaaaaaaaaaaaaaaaaaaaaaaaaaaaaaaaaaaaaaaaaaaaaaaaaaaaaaaaaaaaaaaaaaaaaaaaaaaaaaaaaaaaaaaaaaaaaaaaaaaaaaaaaaaaaaaaaaaaaaaaaaaaaaaaaaaaaaaaaaaaaaaaaaaaaaaaaaaaaaaaaaaaaaaaaaaaaaaaaaaaaaaaaaaaaaaaaaaaaaaaaaaaaaaaaaaaaaaaaaaaaaaaaaaaaaaaaaaaaaaaaaaaaaaaaaaaaaaaaaaaaaaaaaaaaaaaaaaaaaaaaaaaaaaaaaaaaaaaaaaaaaaaaaaaaaaaaaaaaaaaaaaaaaaaaaaaaaaaaaaaaaaaaaaaaaaaaaaaaaaaaaaaaaaaaaaaaaaaaaaaaaaaaaaaaaaaaaaaaaaaaaaaaaaaaaaaaaaaaaaaaaaaaaaaaaaaaaaaaaaaaaaaaaaaaaaaaaaaaaaaaaaaaaaaaaaaaaaaaaaaaaaaaaaaaaaaaaaaaaaaaaaaaaaaaaaaaaaaaaaaaaaaaaaaaaaaaaaaaaaaaaaaaaaaaaaaaaaaaaaaaaaaaaaaaaaaaaaaaaaaaaaaaaaaaaaaaaaaaaaaaaaaaaaaaaaaaaaaaaaaaaaaaaaaaaaaaaaaaaaaaaaaaaaaaaaaaaaaaaaaaaaaaaaaaaaaaaaaaaaaaaaaaaaaaaaaaaaaaaaaaaaaaaaaaaaaaaaaaaaaaaaaaaaaaaaaaaaaaaaaaaaaaaaaaaaaaaaaaaaaaaaaaaaaaaaaaaaaaaaaaaaaaaaaaaaaaaaaaaaaaaaaaaaaaaaaaaaaaaaaaaaaaaaaaaaaaaaaaaaaaaaaaaaaaaaaaaaaaaaaaaaaaaaaaaaaaaaaaaaaaaaaaaaaaaaaaaaaaaaaaaaaaaaaaaaaaaaaaaaaaaaaaaaaaaaaaaaaaaaaaaaaaaaaaaaaaaaaaaaaaaaaaaaaaaaaaaaaaaaaaaaaaaaaaaaaaaaaaaaaaaaaaaaaaaaaaaaaaaaaaaaaaaaaaaaaaaaaaaaaaaaaaaaaaaaaaaaaaaaaaaaaaaaaaaaaaaaaaaaaaaaaaaaaaaaaaaaaaaaaaaaaaaaaaaaaaaaaaaaaaaaaaaaaaaaaaaaaaaaaaaaaaaaaaaaaaaaaaaaaaaaaaaaaaaaaaaaaaaaaaaaaaaaaaaaaaaaaaaaaaaaaaaaaaaaaaaaaaaaaaaaaaaaaaaaaaaaaaaaaaaaaaaaaaaaaaaaaaaaaaaaaaaaaaaaaaaaaaaaaaaaaaaaaaaaaaaaaaaaaaaaaaaaaaaaaaaaaaaaaaaaaaaaaaaaaaaaaaaaaaaaaaaaaaaaaaaaaaaaaaaaaaaaaaaaaaaaaaaaaaaaaaaaaaaaaaaaaaaaaaaaaaaaaaaaaaaaaaaaaaaaaaaaaaaaaaaaaaaaaaaaaaaaaaaaaaaaaaaaaaaaaaaaaaaaaaaaaaaaaaaaaaaaaaaaaaaaaaaaaaaaaaaaaaaaaaaaaaaaaaaaaaaaaaaaaaaaaaaaaaaaaaaaaaaaaaaaaaaaaaaaaaaaaaaaaaaaaaaaaaaaaaaaaaaaaaaaaaaaaaaaaaaaaaaaaaaaaaaaaaaaaaaaaaaaaaaaaaaaaaaaaaaaaaaaaaaaaaaaaaaaaaaaaaaaaaaaaaaaaaaaaaaaaaaaaaaaaaaaaaaaaaaaaaaaaaaaaaaaaaaaaaaaaaaaaaaaaaaaaaaaaaaaaaaaaaaaaaaaaaaaaaaaaaaaaaaaaaaaaaaaaaaaaaaaaaaaaaaaaaaaaaaaaaaaaaaaaaaaaaaaaaaaaaaaaaaaaaaaaaaaaaaaaaaaaaaaaaaaaaaaaaaaaaaaaaaaaaaaaaaaaaaaaaaaaaaaaaaaaaaaaaaaaaaaaaaaaaaaaaaaaaaaaaaaaaaaaaaaaaaaaaaaaaaaaaaaaaaaaaaaaaaaaaaaaaaaaaaaaaaaaaaaaaaaaaaaaaaaaaaaaaaaaaaaaaaaaaaaaaaaaaaaaaaaaaaaaaaaaaaaaaaaaaaaaaaaaaaaaaaaaaaaaaaaaaaaaaaaaaaaaaaaaaaaaaaaaaaaaaaaaaaaaaaaaaaaaaaaaaaaaaaaaaaaaaaaaaaaaaaaaaaaaaaaaaaaaaaaaaaaaaaaaaaaaaaaaaaaaaaaaaaaaaaaaaaaaaaaaaaaaaaaaaaaaaaaaaaaaaaaaaaaaaaaaaaaaaaaaaaaaaaaaaaaaaaaaaaaaaaaaaaaaaaaaaaaaaaaaaaaaaaaaaaaaaaaaaaaaaaaaaaaaaaaaaaaaaaaaaaaaaaaaaaaaaaaaaaaaaaaaaaaaaaaaaaaaaaaaaaaaaaaaaaaaaaaaaaaaaaaaaaaaaaaaaaaaaaaaaaaaaaaaaaaaaaaaaaaaaaaaaaaaaaaaaaaaaaaaaaaaaaaaaaaaaaaaaaaaaaaaaaaaaaaaaaaaaaaaaaaaaaaaaaaaaaaaaaaaaaaaaaaaaaaaaaaaaaaaaaaaaaaaaaaaaaaaaaaaa

SEQ ID NO: 1906 - RNA, 5000 nt, Artificial Sequence
  Description of Artificial Sequence: Synthetic polynucleotide
aaaaaaaaaaaaaaaaaaaaaaaaaaaaaaaaaaaaaaaaaaaaaaaaaaaaaaaaaaaaaaaaaaaaaaaaaaaaaaaaaaaaaaaaaaaaaaaaaaaaaaaaaaaaaaaaaaaaaaaaaaaaaaaaaaaaaaaaaaaaaaaaaaaaaaaaaaaaaaaaaaaaaaaaaaaaaaaaaaaaaaaaaaaaaaaaaaaaaaaaaaaaaaaaaaaaaaaaaaaaaaaaaaaaaaaaaaaaaaaaaaaaaaaaaaaaaaaaaaaaaaaaaaaaaaaaaaaaaaaaaaaaaaaaaaaaaaaaaaaaaaaaaaaaaaaaaaaaaaaaaaaaaaaaaaaaaaaaaaaaaaaaaaaaaaaaaaaaaaaaaaaaaaaaaaaaaaaaaaaaaaaaaaaaaaaaaaaaaaaaaaaaaaaaaaaaaaaaaaaaaaaaaaaaaaaaaaaaaaaaaaaaaaaaaaaaaaaaaaaaaaaaaaaaaaaaaaaaaaaaaaaaaaaaaaaaaaaaaaaaaaaaaaaaaaaaaaaaaaaaaaaaaaaaaaaaaaaaaaaaaaaaaaaaaaaaaaaaaaaaaaaaaaaaaaaaaaaaaaaaaaaaaaaaaaaaaaaaaaaaaaaaaaaaaaaaaaaaaaaaaaaaaaaaaaaaaaaaaaaaaaaaaaaaaaaaaaaaaaaaaaaaaaaaaaaaaaaaaaaaaaaaaaaaaaaaaaaaaaaaaaaaaaaaaaaaaaaaaaaaaaaaaaaaaaaaaaaaaaaaaaaaaaaaaaaaaaaaaaaaaaaaaaaaaaaaaaaaaaaaaaaaaaaaaaaaaaaaaaaaaaaaaaaaaaaaaaaaaaaaaaaaaaaaaaaaaaaaaaaaaaaaaaaaaaaaaaaaaaaaaaaaaaaaaaaaaaaaaaaaaaaaaaaaaaaaaaaaaaaaaaaaaaaaaaaaaaaaaaaaaaaaaaaaaaaaaaaaaaaaaaaaaaaaaaaaaaaaaaaaaaaaaaaaaaaaaaaaaaaaaaaaaaaaaaaaaaaaaaaaaaaaaaaaaaaaaaaaaaaaaaaaaaaaaaaaaaaaaaaaaaaaaaaaaaaaaaaaaaaaaaaaaaaaaaaaaaaaaaaaaaaaaaaaaaaaaaaaaaaaaaaaaaaaaaaaaaaaaaaaaaaaaaaaaaaaaaaaaaaaaaaaaaaaaaaaaaaaaaaaaaaaaaaaaaaaaaaaaaaaaaaaaaaaaaaaaaaaaaaaaaaaaaaaaaaaaaaaaaaaaaaaaaaaaaaaaaaaaaaaaaaaaaaaaaaaaaaaaaaaaaaaaaaaaaaaaaaaaaaaaaaaaaaaaaaaaaaaaaaaaaaaaaaaaaaaaaaaaaaaaaaaaaaaaaaaaaaaaaaaaaaaaaaaaaaaaaaaaaaaaaaaaaaaaaaaaaaaaaaaaaaaaaaaaaaaaaaaaaaaaaaaaaaaaaaaaaaaaaaaaaaaaaaaaaaaaaaaaaaaaaaaaaaaaaaaaaaaaaaaaaaaaaaaaaaaaaaaaaaaaaaaaaaaaaaaaaaaaaaaaaaaaaaaaaaaaaaaaaaaaaaaaaaaaaaaaaaaaaaaaaaaaaaaaaaaaaaaaaaaaaaaaaaaaaaaaaaaaaaaaaaaaaaaaaaaaaaaaaaaaaaaaaaaaaaaaaaaaaaaaaaaaaaaaaaaaaaaaaaaaaaaaaaaaaaaaaaaaaaaaaaaaaaaaaaaaaaaaaaaaaaaaaaaaaaaaaaaaaaaaaaaaaaaaaaaaaaaaaaaaaaaaaaaaaaaaaaaaaaaaaaaaaaaaaaaaaaaaaaaaaaaaaaaaaaaaaaaaaaaaaaaaaaaaaaaaaaaaaaaaaaaaaaaaaaaaaaaaaaaaaaaaaaaaaaaaaaaaaaaaaaaaaaaaaaaaaaaaaaaaaaaaaaaaaaaaaaaaaaaaaaaaaaaaaaaaaaaaaaaaaaaaaaaaaaaaaaaaaaaaaaaaaaaaaaaaaaaaaaaaaaaaaaaaaaaaaaaaaaaaaaaaaaaaaaaaaaaaaaaaaaaaaaaaaaaaaaaaaaaaaaaaaaaaaaaaaaaaaaaaaaaaaaaaaaaaaaaaaaaaaaaaaaaaaaaaaaaaaaaaaaaaaaaaaaaaaaaaaaaaaaaaaaaaaaaaaaaaaaaaaaaaaaaaaaaaaaaaaaaaaaaaaaaaaaaaaaaaaaaaaaaaaaaaaaaaaaaaaaaaaaaaaaaaaaaaaaaaaaaaaaaaaaaaaaaaaaaaaaaaaaaaaaaaaaaaaaaaaaaaaaaaaaaaaaaaaaaaaaaaaaaaaaaaaaaaaaaaaaaaaaaaaaaaaaaaaaaaaaaaaaaaaaaaaaaaaaaaaaaaaaaaaaaaaaaaaaaaaaaaaaaaaaaaaaaaaaaaaaaaaaaaaaaaaaaaaaaaaaaaaaaaaaaaaaaaaaaaaaaaaaaaaaaaaaaaaaaaaaaaaaaaaaaaaaaaaaaaaaaaaaaaaaaaaaaaaaaaaaaaaaaaaaaaaaaaaaaaaaaaaaaaaaaaaaaaaaaaaaaaaaaaaaaaaaaaaaaaaaaaaaaaaaaaaaaaaaaaaaaaaaaaaaaaaaaaaaaaaaaaaaaaaaaaaaaaaaaaaaaaaaaaaaaaaaaaaaaaaaaaaaaaaaaaaaaaaaaaaaaaaaaaaaaaaaaaaaaaaaaaaaaaaaaaaaaaaaaaaaaaaaaaaaaaaaaaaaaaaaaaaaaaaaaaaaaaaaaaaaaaaaaaaaaaaaaaaaaaaaaaaaaaaaaaaaaaaaaaaaaaaaaaaaaaaaaaaaaaaaaaaaaaaaaaaaaaaaaaaaaaaaaaaaaaaaaaaaaaaaaaaaaaaaaaaaaaaaaaaaaaaaaaaaaaaaaaaaaaaaaaaaaaaaaaaaaaaaaaaaaaaaaaaaaaaaaaaaaaaaaaaaaaaaaaaaaaaaaaaaaaaaaaaaaaaaaaaaaaaaaaaaaaaaaaaaaaaaaaaaaaaaaaaaaaaaaaaaaaaaaaaaaaaaaaaaaaaaaaaaaaaaaaaaaaaaaaaaaaaaaaaaaaaaaaaaaaaaaaaaaaaaaaaaaaaaaaaaaaaaaaaaaaaaaaaaaaaaaaaaaaaaaaaaaaaaaaaaaaaaaaaaaaaaaaaaaaaaaaaaaaaaaaaaaaaaaaaaaaaaaaaaaaaaaaaaaaaaaaaaaaaaaaaaaaaaaaaaaaaaaaaaaaaaaaaaaaaaaaaaaaaaaaaaaaaaaaaaaaaaaaaaaaaaaaaaaaaaaaaaaaaaaaaaaaaaaaaaaaaaaaaaaaaaaaaaaaaaaaaaaaaaaaaaaaaaaaaaaaaaaaaaaaaaaaaaaaaaaaaaaaaaaaaaaaaaaaaaaaaaaaaaaaaaaaaaaaaaaaaaaaaaaaaaaaaaaaaaaaaaaaaaaaaaaaaaaaaaaaaaaaaaaaaaaaaaaaaaaaaaaaaaaaaaaaaaaaaaaaaaaaaaaaaaaaaaaaaaaaaaaaaaaaaaaaaaaaaaaaaaaaaaaaaaaaaaaaaaaaaaaaaaaaaaaaaaaaaaaaaaaaaaaaaaaaaaaaaaaaaaaaaaaaaaaaaaaaaaaaaaaaaaaaaaaaaaaaaaaaaaaaaaaaaaaaaaaaaaaaaaaaaaaaaaaaaaaaaaaaaaaaaaaaaaaaaaaaaaaaaaaaaaaaaaaaaaaaaaaaaaaaaaaaaaaaaaaaaaaaaaaaaaaaaaaaaaaaaaaaaaaaaaaaaaaaaaaaaaaaaaaaaaaaaaaaaaaaaaaaaaaaaaaaaaaaaaaaaaaaaaaaaaaaaaaaaaaaaaaaaaaaaaaaaaaaaaaaaaaaaaaaaaaaaaaaaaaaaaaaaaaaaaaaaaaaaaaaaaaaaaaaaaaaaaaaaaaaaaaaaaaaaaaaaaaaaaaaaaaaaaaaaaaaaaaaaaaaaaaaaaaaaaaaaaaaaaaaaaaaaaaaaaaaaaaaaaaaaaaaaaaaaaaaaaaaaaaaaaaaaaaaaaaaaaaaaaaaaaaaaaaaaaaaaaaaaaaaaaaaaaaaaaaaaaaaaaaaaaaaaaaaaaaaaaaaaaaaaaaaaaaaaaaaaaaaaaaaaaaaaaaaaaaaaaaaaaaaaaaaaaaaaaaaaaaaaaaaaaaaaaaaaaaaaaaaaaaaaaaaaaaaaaaaaaaaaaaaaaaaaaaaaaaaaaaaaaaaaaaaaaaaaaaaaaaaaaaaaaaaaaaaaaaaaaaaaaaaaaaaaaaaaaaaaaaaaaaaaaaaaaaaaaaaaaaaaaaaaaaaaaaaaaaaaaaaaaaaaaaaaaaaaaaaaaaaaaaaaaaaaaaaaaaaaaaaaaaaaaaaaaaaaaaaaaaaaaaaaaaaaaaaaaaaaaaaaaaaaaaaaaaaaaaaaaaaaaaaaaaaaaaaaaaaaaaaaaaaaaaaaaaaaaaaaaaaaaaaaaaaaaaaaaaaaaaaaaaaaaaaaaaaaaaaaaaaaaaaaaaaaaaaaaaaaaaaaaaaaaaaaaaaaaaaaaaaaaaaaaaaaaaaaaaaaaaaaaaaaaaaaaaaaaaaaaaaaaaaaaaaaaaaaaaaaaaaaaaaaaaaaaaaaaaaaaaaaaaaaaaaaaaaaaaaaaaaaaaaaaaaaaaaaaaaaaaaaaaaaaaaaaaaaaaaaaaaaaaaaaaaaaaaaaaaaaaaaaaaaaaaaaaaaaaaaaaaaaaaaaaaaaaaaaaaaaaaaaaaaaaaaaaaaaaaaaaaaaaaaaaaaaaaaaaaaaaaaaaaaaaaaaaaaaaaaaaaaaaaaaaaaaaaaaaaaaaaaaaaaaaaaaaaaaaaaaaaaaaaaaaaaaaaaaaaaaaaaaaaaaaaaaaaaaaaaaaaaaaaaaaaaaaaaaaaaaaaaaaaaaaaaaaaaaaaaaaaaaaaaaaaaaaaaaaaaaaaaaaaaaaaaaaaaaaaaaaaaaaaaaaaaaaaaaaaaaaaaaaaaaaaaaaaaaaaaaaaaaaaaaaaaaaaaaaaaaaaaaaaaaaaaaaaaaaaaaaaaaaaaaaaaaaaaaaaaaaaaaaaaaaaaaaaaaaaaaaaaaaaaaaaaaaaaaaaaaaaaaaaaaaaaaa

SEQ ID NO: 1907 - protein, 20 aa, Artificial Sequence
  Description of Artificial Sequence: Synthetic peptide
GGGSGGGSGGGSGGGSGGGS
